(19) United States
(12) Patent Application Publication
(10) Pub. No.: US 2011/0294982 A1
(43) Pub. Date: Dec. 1, 2011

(54) AMINO ACID SEQUENCES DIRECTED AGAINST INTEGRINS AND USES THEREOF

(75) Inventors: Peter Vanlandschoot, Belgium (BE); Michael John Scott Saunders, Brussels (BE); Johannes Joseph Wilhelmus De Haard, Oudelande (NL); Christophe Blanchetot, Destelbergen (BE); Theo Verrips, Utrecht (NL); Marc Antoine Gijsbert Gilles Vooijs, Be Cadier en Keer (NL); Adrianus Johannes Groot, Je Maastricht (NL); Mohamed El Khattabi, Amersfoort (NL)

(73) Assignee: Ablynx N.V., Zwignaarde (BE)

(21) Appl. No.: 12/991,576

(22) PCT Filed: May 11, 2009
(86) PCT No.: PCT/EP2009/055679

§ 371 Date: Apr. 22, 2011

Related U.S. Application Data
(60) Provisional application No. 61/051,763, filed on May 9, 2008.

(51) Int. Cl. C07K 14/00

(52) U.S. Cl. 530/350

(57) ABSTRACT

The present invention relates to amino acid sequences that are directed against (as defined herein) Integrins, as well as to compounds or constructs, and in particular proteins and polypeptides, that comprise or essentially consist of one or more such amino acid sequences (also referred to herein as [symbol] □amino acid sequences of the invention□ com□pounds of the invention□, poly [symbol] [symbol] □peptides of the invention□, respectively).

[0001] The present invention relates to amino acid sequences that are directed against (as defined herein) Integrins, as well as to compounds or constructs, and in particular proteins and polypeptides, that comprise or essentially consist of one or more such amino acid sequences (also referred to herein as [symbol] □amino acid sequences of the invention□ com□pounds of the invention□, poly [symbol] [symbol] □peptides of the invention□, respectively).

[0002] The invention also relates to nucleic acids encoding such amino acid sequences and polypeptides (also referred to herein as □nucleic acids of the invention□ nucle□otide sequences of the invention□); to methods for preparing such amino acid sequences and polypeptides; to host cells expressing or capable of expressing such amino acid sequences or polypeptides; to compositions, and in particular to pharmaceutical compositions, that comprise such amino acid sequences, polypeptides, nucleic acids and/or host cells; and to uses of such amino acid sequences or polypeptides, nucleic acids, host cells and/or compositions, in particular for prophylactic, therapeutic or diagnostic purposes, such as the prophylactic, therapeutic or diagnostic purposes mentioned herein.

[0003] Other aspects, embodiments, advantages and applications of the invention will become clear from the further description herein.

[0004] Integrins are cell adhesion molecules that mediate cell-cell, cell extracellular matrix, and cell-pathogen interactions. They play critical roles in development, wound healing, hemostasis, immunity and cancer.

[0005] Integrin adhesiveness can be dynamically regulated through a process termed inside-out signaling. In addition, ligand binding transduces signals from the extracellular domain to the cytoplasm in the classical outside-in direction. (Luo et al. Annu. Rev. Immunol. 2007. 25:619□47).

[0006] Integrins are noncovalently associated heterodimeric cell surface adhesion molecules composed of one alpha subunit and one beta subunit. In vertebrates, 18 α subunits and 8 β subunits form 24 known αβ pairs (see Luo et al., supra, page 620, FIG. 1). Half of integrin α-subunits contain inserted (I) domains, which are the principal ligand-binding domains when present. This diversity in subunit composition contributes to diversity in ligand recognition, binding to cytoskeletal components and coupling to downstream signaling pathways. Activation of integrin rely on a large change in conformation from a closed (low affinity) conformation to an open (high affinity) conformation (see Luo et al., supra, page 628, FIG. 6).

[0007] Dysregulation of integrins is involved in the pathogenesis of many disease states, from autoimmunity to thrombotic vascular diseases to cancer metastasis. Therefore, extensive efforts have been directed towards the discovery and development of integrin antagonists for clinical applications. Targeting aIIbb3 on platelets inhibits thrombosis, aVb3 and aVb5 blocks tumour metastasis, angiogenesis and bone resorption, and β2 integrins and a4 integrins on leukocytes for treating autoimmune diseases and other inflammatory disorders (see Shimaoka et al. Nature reviews in drug discovery 2003 pp 703-715 and reference therein).

[0008] Infiltration of leukocyte at the site of infection or inflammation depends on the adhesion of the leukocyte to the endothelial cell layer which is dependent integrins Inflammatory disease, auto-immune diseases, atherosclerosis. Efalizumab (Raptiva™) blocks LFA-1 (aLb2) and its use for the treatment of chronic plaque psoriasis. Natalizumab (Tysabri/Antegren™) blocks very late antigen-4 (VLA4/a4b1) for the treatment of relapsing-remitting multiple sclerosis. ReoPro/Abciximab target and blocks alphaIIbbeta3 (platelet integrin), Centocor/JandJ. FDA approved this anti-thrombotic agent in 1994. Blocking a5b1 blocks angiogenesis and consequently is used against cancer. Also anti alphaV therapies are efficient in blocking tumorigenesis. For example, Volociximab is an anti-a5b1 antibody inhibiting angiogenesis (PDL Biopharma/Biogen Idec) and CNTO95 is an anti-aV now in Phase I (Medarex/Centocor). Vitaxin/Abegrin/MEDI-522 (MedImmune) is in clinical trials (Phase 3) for metastatic melanoma and prostate cancer; blocks the interaction of alphaVbeta3 (the predominant integrin on osteoclasts) with various ligands such as osteopontin (see also e.g. table 1 from Sixt et al., Current Opinion in Cell Biology 2006, 18:482 [symbol] [symbol] 490. Virus infection. Several viruses use the integrin to bind and infect cells (see table 1 from Dunehoo et al., Journal of pharmaceutical sciences, vol. 95, (9), 2006, pp 1856-1872. The foot-and-mouth disease virus also use aVb6 as a receptor. In addition to the antibody therapies, many small-molecule antagonists have been developed: Tirofiban, and Epifibatide are two clinically approved antagonist. Other compounds also exist like BIRT0377, LFA703, and A-286982 (See Shimaoka and Springer, Nature reviews in Drug Discovery (2) pp 703-717, 2003 and reference therein). Many peptide therapies have been developed as well (see. Dunehoo et al., Journal of pharmaceutical sciences, vol. 95, (9), 2006, pp 1856-1872 and reference there in).

[0009] Agonistic compounds have also been found; see, A Small Molecule Agonist of an Integrin, alphaLbeta2 (Yang et al. JBC, (281) pp. 37904□387912, 2006). Although it stimulates ligand binding, this compound nonetheless inhibits lymphocyte transendothelial migration probably because of a de-adhesion defect.

[0010] The polypeptides and compositions of the present invention can generally be used to modulate, and in particular inhibit and/or prevent, binding of Integrin-Ligands to the Integrins, and thus to modulate, and in particular inhibit or prevent, the signalling that is mediated by Integrin-Ligands to Integrins, to modulate the biological pathways in which Integrin-Ligands and/or Integrins are involved, and/or to modulate the biological mechanisms, responses and effects associated with such signalling or these pathways.

[0011] As such, the polypeptides and compositions of the present invention can be used for the prevention and treatment (as defined herein) of autoimmune diseases, cancer metastasis and thrombotic vascular diseases. Generally, [symbol] [symbol] autoimmune diseases, cancer metastasis and thrombotic vascular diseases□ can be defined as diseases and disorders that can be prevented and/or treated, respectively, by suitably administering to a subject in need thereof (i.e. having the disease or disorder or at least one symptom thereof and/or at risk of attracting or developing the disease or disorder) of either a polypeptide or composition of the invention (and in particular, of a pharmaceutically active amount thereof) and/or of a known active principle active against Integrins or a biological pathway or mechanism in which Integrins is involved (and in particular, of a pharmaceutically active amount thereof). Examples of such autoimmune diseases, cancer metastasis and thrombotic vascular diseases will be clear to the skilled person based on the disclosure herein, and for example include the following diseases and disorders:

[0012] Inflammatory disease, auto-immune diseases, atherosclerosis: Infiltration of leukocyte at the site of infection or inflammation depends on the adhesion of the leukocyte to the endothelial cell layer which is dependent integrins.

[0013] Psoriasis: Efalizumab (Raptiva™) blocks LFA-1 (aLb2) and is use for the treatment of chronic plaque psoriasis

[0014] Multiple Sclerosis: Natalizumab (Tysabri/Antegren™) blocks very late antigen-4 (VLA4/a4b1) for the treatment of relapsing-remitting multiple sclerosis.

[0015] Thrombosis: ReoPro/Abciximab target and blocks alphaIIbbeta3 (platelet integrin), Centocor/JandJ FDA approved in 1994

[0016] Cancer: Blocking a5b1 blocks angiogenesis and consequently is used against cancer. Also anti alphaV therapies are efficient in blocking tumorigenesis. For example, Volociximab is an anti-a5b1 antibody inhibiting angiogenesis (PDL Biopharma/Biogen Idec) and CNTO95 is an anti-aV. now in Phase I (Medarex/Centocor). Vitaxin/Abegrin/MEDI-522 (MedImmune) is in clinical trials (Phase 3) for metastatic melanoma and prostate cancer; blocks the interaction of alphaVbeta3 (the predominant integrin on osteoclasts) with various ligands such as osteopontin.

[0017] Virus infection. Several virus use the integrin to bind and infect cells (see Table 1 from Dunehoo et al., Journal of pharmaceutical sciences, vol. 95(9), 2006, pp 1856-1872.

[0018] The foot-and-mouth disease virus also use aVb6 as a receptor.

### SUMMARY OF THE INVENTION

[0019] In particular, the polypeptides and compositions of the present invention can be used for the prevention and treatment of autoimmune diseases, cancer metastasis and thrombotic vascular diseases which are characterized by excessive and/or unwanted signalling mediated by Integrins or by the pathway(s) in which Integrins are involved. Examples of such autoimmune diseases, cancer metastasis and thrombotic vascular diseases will again be clear to the skilled person based on the disclosure herein.

[0020] Thus, without being limited thereto, the amino acid sequences and polypeptides of the invention can for example be used to prevent and/or to treat all diseases and disorders that are currently being prevented or treated with active principles that can modulate Integrins-mediated signalling, such as those mentioned in the prior art cited above. It is also envisaged that the polypeptides of the invention can be used to prevent and/or to treat all diseases and disorders for which treatment with such active principles is currently being developed, has been proposed, or will be proposed or developed in future. In addition, it is envisaged that, because of their favourable properties as further described herein, the polypeptides of the present invention may be used for the prevention and treatment of other diseases and disorders than those for which these known active principles are being used or will be proposed or developed; and/or that the polypeptides of the present invention may provide new methods and regimens for treating the diseases and disorders described herein.

[0021] Other applications and uses of the amino acid sequences and polypeptides of the invention will become clear to the skilled person from the further disclosure herein.

[0022] Generally, it is an object of the invention to provide pharmacologically active agents, as well as compositions comprising the same, that can be used in the diagnosis, prevention and/or treatment of autoimmune diseases, cancer metastasis and thrombotic vascular diseases and of the further diseases and disorders mentioned herein; and to provide methods for the diagnosis, prevention and/or treatment of such diseases and disorders that involve the administration and/or use of such agents and compositions.

[0023] In particular, it is an object of the invention to provide such pharmacologically active agents, compositions and/or methods that have certain advantages compared to the agents, compositions and/or methods that are currently used and/or known in the art. These advantages will become clear from the further description below.

[0024] More in particular, it is an object of the invention to provide therapeutic proteins that can be used as pharmacologically active agents, as well as compositions comprising the same, for the diagnosis, prevention and/or treatment of autoimmune diseases, cancer metastasis and thrombotic vascular diseases and of the further diseases and disorders mentioned herein; and to provide methods for the diagnosis, prevention and/or treatment of such diseases and disorders that involve the administration and/or the use of such therapeutic proteins and compositions.

[0025] Accordingly, it is a specific object of the present invention to provide amino acid sequences that are directed against (as defined herein) Integrins, in particular against Integrins from a warm-blooded animal, more in particular against Integrins from a mammal, and especially against human Integrins; and to provide proteins and polypeptides comprising or essentially consisting of at least one such amino acid sequence.

[0026] In particular, it is a specific object of the present invention to provide such amino acid sequences and such proteins and/or polypeptides that are suitable for prophylactic, therapeutic and/or diagnostic use in a warm-blooded animal, and in particular in a mammal, and more in particular in a human being.

[0027] More in particular, it is a specific object of the present invention to provide such amino acid sequences and such proteins and/or polypeptides that can be used for the prevention, treatment, alleviation and/or diagnosis of one or more diseases, disorders or conditions associated with Integrins and/or mediated by Integrins (such as the diseases, disorders and conditions mentioned herein) in a warm-blooded animal, in particular in a mammal, and more in particular in a human being.

[0028] It is also a specific object of the invention to provide such amino acid sequences and such proteins and/or polypeptides that can be used in the preparation of pharmaceutical or veterinary compositions for the prevention and/or treatment of one or more diseases, disorders or conditions associated with and/or mediated by Integrins (such as the diseases, disorders and conditions mentioned herein) in a warm-blooded animal, in particular in a mammal, and more in particular in a human being. In the invention, generally, these objects are achieved by the use of the amino acid sequences, proteins, polypeptides and compositions that are described herein.

[0029] In general, the invention provides amino acid sequences that are directed against (as defined herein) and/or can specifically bind (as defined herein) to Integrins; as well as compounds and constructs, and in particular proteins and polypeptides, that comprise at least one such amino acid sequence.

[0030] More in particular, the invention provides amino acid sequences that can bind to Integrins with an affinity (suitably measured and/or expressed as a K_{D}-value (actual or apparent), a K_{A}-value (actual or apparent), a kₒₙ-rate and/or a k_{off}-rate, or alternatively as an IC₅₀ value, as further described herein) that is as defined herein; as well as compounds and constructs, and in particular proteins and polypeptides, that comprise at least one such amino acid sequence.

[0031] In particular, amino acid sequences and polypeptides of the invention are preferably such that they:
[0032] bind to Integrins with a dissociation constant (K_{D}) of 10⁻⁵ to 10⁻¹² moles/liter or less, and preferably 10⁻⁷ to 10⁻¹² moles/liter or less and more preferably 10⁻⁸ to 10⁻¹² moles/liter (i.e. with an association constant (K_{A}) of 10⁵ to 10¹² liter/moles or more, and preferably 10⁷ to 10¹² liter/moles or more and more preferably 10⁸ to 10¹² liter/moles);
   and/or such that they:
[0033] bind to Integrins with a kₒₙ-rate of between 10² M⁻¹s⁻¹ to about 10⁷ M⁻¹s⁻¹, preferably between 10³ M⁻¹s⁻¹ and 10⁷ M⁻¹s⁻¹, more preferably between 10⁴ M⁻¹s⁻¹ and 10⁷ M⁻¹s⁻¹, such as between 10⁵ M⁻¹s⁻¹ and 10⁷M⁻¹ s⁻¹;
   and/or such that they:
[0034] bind to Integrins with a k_{off} rate between 1s⁻¹ (t_{1/2}=0.69 s) and 10⁻⁶ s⁻¹ (providing a near irreversible complex with a t_{1/2} of multiple days), preferably between 10⁻² s⁻¹ and 10⁻⁶ s⁻¹, more preferably between 10⁻³ s⁻¹ and 10⁻⁶ s⁻¹, such as between 10⁻⁴ s⁻¹ and 10⁻⁶ s⁻¹.

[0035] Preferably, a monovalent amino acid sequence of the invention (or a polypeptide that contains only one amino acid sequence of the invention) is preferably such that it will bind to Integrins with an affinity less than 500 nM, preferably less than 200 nM, more preferably less than 10 nM, such as less than 500 pM.

[0036] Some preferred IC50 values for binding of the amino acid sequences or polypeptides of the invention to Integrins will become clear from the further description and examples herein.

[0037] For binding to Integrins, an amino acid sequence of the invention will usually contain within its amino acid sequence one or more amino acid residues or one or more stretches of amino acid residues (i.e. with each□ stretch□ comprising two or amino acid residues that are adjacent to each other or in close proximity to each other, i.e. in the primary or tertiary structure of the amino acid sequence) via which the amino acid sequence of the invention can bind to Integrins, which amino acid residues or stretches of amino acid residues thus form the □site□ for binding to Integrins (also referred to herein [symbol] [symbol] binding site□).

[0038] The amino acid sequences provided by the invention are preferably in essentially isolated form (as defined herein), or form part of a protein or polypeptide of the invention (as defined herein), which may comprise or essentially consist of one or more amino acid sequences of the invention and which may optionally further comprise one or more further amino acid sequences (all optionally linked via one or more suitable linkers). For example, and without limitation, the one or more amino acid sequences of the invention may be used as a binding unit in such a protein or polypeptide, which may optionally contain one or more further amino acid sequences that can serve as a binding unit (i.e. against one or more other targets than Integrins), so as to provide a monovalent, multivalent or multispecific polypeptide of the invention, respectively, all as described herein. Such a protein or polypeptide may also be in essentially isolated form (as defined herein).

[0039] The amino acid sequences and polypeptides of the invention as such preferably essentially consist of a single amino acid chain that is not linked via disulphide bridges to any other amino acid sequence or chain (but that may or may not contain one or more intramolecular disulphide bridges. For example, it is known that Nanobodies □as described herein—may sometimes contain a disulphide bridge between CDR3 and CDR1 or FR2). However, it should be noted that one or more amino acid sequences of the invention may be linked to each other and/or to other amino acid sequences (e.g. via disulphide bridges) to provide peptide constructs that may also be useful in the invention (for example Fab□ fragments, F(ab□₂ fragments, ScFv constructs, □ diabodies□ and other multispecific constructs. Reference is for example made to the review by Holliger and Hudson, Nat. Biotechnol. 2005 September; 23(9):1126-36).

[0040] Generally, when an amino acid sequence of the invention (or a compound, construct or polypeptide comprising the same) is intended for administration to a subject (for example for therapeutic and/or diagnostic purposes as described herein), it is preferably either an amino acid sequence that does not occur naturally in said subject; or, when it does occur naturally in said subject, in essentially isolated form (as defined herein).

[0041] It will also be clear to the skilled person that for pharmaceutical use, the amino acid sequences of the invention (as well as compounds, constructs and polypeptides comprising the same) are preferably directed against human Integrins; whereas for veterinary purposes, the amino acid sequences and polypeptides of the invention are preferably directed against Integrins from the species to be treated, or at least cross-reactive with Integrins from the species to be treated.

[0042] Furthermore, an amino acid sequence of the invention may optionally, and in addition to the at least one binding site for binding against Integrins, contain one or more further binding sites for binding against other antigens, proteins or targets.

[0043] The efficacy of the amino acid sequences and polypeptides of the invention, and of compositions comprising the same, can be tested using any suitable in vitro assay, cell-based assay, in vivo assay and/or animal model known per se, or any combination thereof, depending on the specific disease or disorder involved. Suitable assays and animal models will be clear to the skilled person, and for example include Biacore, FLIPR, cell based models such as adhesion of cell expressing relevant integrin on relevant coated ligands, binding of labelled ligand to cell expressing the relevant integrin, attachment of leukocyte to endothelial cells, cell survival text for cancer indication, animal models such as mouse models monitoring inflammatory cell recruitment, cancer models, as well as the assays and animal models used in the experimental part below and in the prior art cited herein.

[0044] Also, according to the invention, amino acid sequences and polypeptides that are directed against Integrins from a first species of warm-blooded animal may or may not show cross-reactivity with Integrins from one or more other species of warm-blooded animal. For example, amino acid sequences and polypeptides directed against human Integrins may or may not show cross reactivity with Integrins from one or more other species of primates (such as, without limitation, monkeys from the genus Macaca (such as, and in particular, cynomolgus monkeys (Macaca fascicularis) and/or rhesus monkeys (Macaca mulatta)) and baboon (Papio ursinus)) and/or with Integrins from one or more species of animals that are often used in animal models for diseases (for example mouse, rat, rabbit, pig or dog), and in particular in animal models for diseases and disorders associated with Integrins (such as the species and animal models mentioned herein). In this respect, it will be clear to the skilled person that such cross-reactivity, when present, may have advantages from a drug development point of view, since it allows the amino acid sequences and polypeptides against human Integrins to be tested in such disease models.

[0045] More generally, amino acid sequences and polypeptides of the invention that are cross-reactive with Integrins from multiple species of mammal will usually be advantageous for use in veterinary applications, since it will allow the same amino acid sequence or polypeptide to be used across multiple species. Thus, it is also encompassed within the scope of the invention that amino acid sequences and polypeptides directed against Integrins from one species of animal (such as amino acid sequences and polypeptides against human Integrins) can be used in the treatment of another species of animal, as long as the use of the amino acid sequences and/or polypeptides provide the desired effects in the species to be treated.

[0046] The present invention is in its broadest sense also not particularly limited to or defined by a specific antigenic determinant, epitope, part, domain, subunit or confirmation (where applicable) of Integrins against which the amino acid sequences and polypeptides of the invention are directed. For example, the amino acid sequences and polypeptides may or may not be directed against an □interaction site□ (as define herein [symbol] [symbol] ), it is generally assumed and preferred that the amino acid sequences and polypeptides of the invention are preferably directed against an interaction site (as defined herein), and in particular against the site of integrin activation, e.g. the amino acid sequences and polypeptides may or may not be directed against an epitope available only after activation, or site of integrin inactivation, e.g. the amino acid sequences and polypeptides may or may not be directed against an epitope available only when inactivated.

[0047] As further described herein, a polypeptide of the invention may contain two or more amino acid sequences of the invention that are directed against Integrins. Generally, such polypeptides will bind to Integrins with increased avidity compared to a single amino acid sequence of the invention. Such a polypeptide may for example comprise two amino acid sequences of the invention that are directed against the same antigenic determinant, epitope, part, domain, subunit or confirmation (where applicable) of Integrins (which may or may not be an interaction site); or comprise at least one □ first□ amino acid sequence of the invention that is directed against a first same antigenic determinant, epitope, part, domain, subunit or confirmation (where applicable) of Integrins (which may or may not be an interaction site); and at least one□second□ amino acid sequence of the invention [symbol] [symbol] inst a second antigenic determinant, epitope, part, domain, subunit or confirmation (where applicable) different from the first (and which again may or may not be an interaction site). Preferably, in such □biparatopic□ polypeptides of the [symbol] [symbol] amino acid sequence of the invention is directed against an interaction site (as defined herein), although the invention in its broadest sense is not limited thereto.

[0048] Also, when the target is part of a binding pair (for example, a receptor-ligand binding pair), the amino acid sequences and polypeptides may be such that they compete with the cognate binding partner (e.g. the ligand, receptor or other binding partner, as applicable) for binding to the target, and/or such that they (fully or partially) neutralize binding of the binding partner to the target.

[0049] It is also within the scope of the invention that, where applicable, an amino acid sequence of the invention can bind to two or more antigenic determinants, epitopes, parts, domains, subunits or confirmations of Integrins. In such a case, the antigenic determinants, epitopes, parts, domains or subunits of Integrins to which the amino acid sequences and/or polypeptides of the invention bind may be essentially the same (for example, if Integrins contains repeated structural motifs or occurs in a multimeric form) or may be different (and in the latter case, the amino acid sequences and polypeptides of the invention may bind to such different antigenic determinants, epitopes, parts, domains, subunits of Integrins with an affinity and/or specificity which may be the same or different). Also, for example, when Integrins exists in an activated conformation and in an inactive conformation, the amino acid sequences and polypeptides of the invention may bind to either one of these confirmation, or may bind to both these confirmations (i.e. with an affinity and/or specificity which may be the same or different). Also, for example, the amino acid sequences and polypeptides of the invention may bind to a conformation of Integrins in which it is bound to a pertinent ligand, may bind to a conformation of Integrins in which it not bound to a pertinent ligand, or may bind to both such conformations (again with an affinity and/or specificity which may be the same or different).

[0050] It is also expected that the amino acid sequences and polypeptides of the invention will generally bind to all naturally occurring or synthetic analogs, variants, mutants, alleles, parts and fragments of Integrins; or at least to those analogs, variants, mutants, alleles, parts and fragments of Integrins that contain one or more antigenic determinants or epitopes that are essentially the same as the antigenic determinant(s) or epitope(s) to which the amino acid sequences and polypeptides of the invention bind in Integrins (e.g. in wild-type Integrins). Again, in such a case, the amino acid sequences and polypeptides of the invention may bind to such analogs, variants, mutants, alleles, parts and fragments with an affinity and/or specificity that are the same as, or that are different from (i.e. higher than or lower than), the affinity and specificity with which the amino acid sequences of the invention bind to (wild-type) Integrins. It is also included within the scope of the invention that the amino acid sequences and polypeptides of the invention bind to some analogs, variants, mutants, alleles, parts and fragments of Integrins, but not to others.

[0051] When Integrins exists in a monomeric form and in one or more multimeric forms, it is within the scope of the invention that the amino acid sequences and polypeptides of the invention only bind to Integrins in monomeric form, only bind to Integrins in multimeric form, or bind to both the monomeric and the multimeric form. Again, in such a case, the amino acid sequences and polypeptides of the invention may bind to the monomeric form with an affinity and/or specificity that are the same as, or that are different from (i.e. higher than or lower than), the affinity and specificity with which the amino acid sequences of the invention bind to the multimeric form.

[0052] Also, when Integrins can associate with other proteins or polypeptides to form protein complexes (e.g. with multiple subunits), it is within the scope of the invention that the amino acid sequences and polypeptides of the invention bind to Integrins in its non-associated state, bind to Integrins in its associated state, or bind to both. In all these cases, the amino acid sequences and polypeptides of the invention may bind to such multimers or associated protein complexes with an affinity and/or specificity that may be the same as or different from (i.e. higher than or lower than) the affinity and/or specificity with which the amino acid sequences and polypeptides of the invention bind to Integrins in its monomeric and non-associated state.

[0053] Also, as will be clear to the skilled person, proteins or polypeptides that contain two or more amino acid sequences directed against Integrins may bind with higher avidity to Integrins than the corresponding monomeric amino acid sequence(s). For example, and without limitation, proteins or polypeptides that contain two or more amino acid sequences directed against different epitopes of Integrins may (and usually will) bind with higher avidity than each of the different monomers, and proteins or polypeptides that contain two or more amino acid sequences directed against Integrins may (and usually will) bind also with higher avidity to a multimer of Integrins.

[0054] Generally, amino acid sequences and polypeptides of the invention will at least bind to those forms of Integrins (including monomeric, multimeric and associated forms) that are the most relevant from a biological and/or therapeutic point of view, as will be clear to the skilled person.

[0055] It is also within the scope of the invention to use parts, fragments, analogs, mutants, variants, alleles and/or derivatives of the amino acid sequences and polypeptides of the invention, and/or to use proteins or polypeptides comprising or essentially consisting of one or more of such parts, fragments, analogs, mutants, variants, alleles and/or derivatives, as long as these are suitable for the uses envisaged herein. Such parts, fragments, analogs, mutants, variants, alleles and/or derivatives will usually contain (at least part of) a functional antigen-binding site for binding against Integrins; and more preferably will be capable of specific binding to Integrins, and even more preferably capable of binding to Integrins with an affinity (suitably measured and/or expressed as a K_{D}-value (actual or apparent), a K_{A}-value (actual or apparent), a kₒₙ-rate and/or a k_{off}-rate, or alternatively as an IC₅₀ value, as further described herein) that is as defined herein. Some non-limiting examples of such parts, fragments, analogs, mutants, variants, alleles, derivatives, proteins and/or polypeptides will become clear from the further description herein. Additional fragments or polypeptides of the invention may also be provided by suitably combining (i.e. by linking or genetic fusion) one or more (smaller) parts or fragments as described herein.

[0056] In one specific, but non-limiting aspect of the invention, which will be further described herein, such analogs, mutants, variants, alleles, derivatives have an increased half-life in serum (as further described herein) compared to the amino acid sequence from which they have been derived. For example, an amino acid sequence of the invention may be linked (chemically or otherwise) to one or more groups or moieties that extend the half-life (such as PEG), so as to provide a derivative of an amino acid sequence of the invention with increased half-life.

[0057] In one specific, but non-limiting aspect, the amino acid sequence of the invention may be an amino acid sequence that comprises an immunoglobulin fold or may be an amino acid sequence that, under suitable conditions (such as physiological conditions) is capable of forming an immunoglobulin fold (i.e. by folding). Reference is inter alia made to the review by Halaby et al., J. (1999) Protein Eng. 12, 563-71. Preferably, when properly folded so as to form an immunoglobulin fold, such an amino acid sequence is capable of specific binding (as defined herein) to Integrins; and more preferably capable of binding to Integrins with an affinity (suitably measured and/or expressed as a K_{D}-value (actual or apparent), a K_{A}-value (actual or apparent), a kₒₙ-rate and/or a k_{off}-rate, or alternatively as an IC₅₀ value, as further described herein) that is as defined herein. Also, parts, fragments, analogs, mutants, variants, alleles and/or derivatives of such amino acid sequences are preferably such that they comprise an immunoglobulin fold or are capable for forming, under suitable conditions, an immunoglobulin fold.

[0058] In particular, but without limitation, the amino acid sequences of the invention may be amino acid sequences that essentially consist of 4 framework regions (FR1 to FR4 respectively) and 3 complementarity determining regions (CDR1 to CDR3 respectively); or any suitable fragment of such an amino acid sequence (which will then usually contain at least some of the amino acid residues that form at least one of the CDR□s, as further described herein).

[0059] The amino acid sequences of the invention may in particular be an immunoglobulin sequence or a suitable fragment thereof, and more in particular be an immunoglobulin variable domain sequence or a suitable fragment thereof, such as light chain variable domain sequence (e.g. a V_{L}-sequence) or a suitable fragment thereof; or a heavy chain variable domain sequence (e.g. a V_{H}-sequence) or a suitable fragment thereof. When the amino acid sequence of the invention is a heavy chain variable domain sequence, it may be a heavy chain variable domain sequence that is derived from a conventional four-chain antibody (such as, without limitation, a V_{H} sequence that is derived from a human antibody) or be a so-called V_{HH}-sequence (as defined herein) that is derived from a so-called□ heavy chain antibody□ (as defined herein).

[0060] However, it should be noted that the invention is not limited as to the origin of the amino acid sequence of the invention (or of the nucleotide sequence of the invention used to express it), nor as to the way that the amino acid sequence or nucleotide sequence of the invention is (or has been) generated or obtained. Thus, the amino acid sequences of the invention may be naturally occurring amino acid sequences (from any suitable species) or synthetic or semi-synthetic amino acid sequences. In a specific but non-limiting aspect of the invention, the amino acid sequence is a naturally occurring immunoglobulin sequence (from any suitable species) or a synthetic or semi-synthetic immunoglobulin sequence, including but not limited to□ humanized□ (as defined herein) immunoglobulin sequences (such as partially or fully humanized mouse or rabbit immunoglobulin sequences, and in particular partially or fully humanized V_{HH} sequences or Nanobodies),□ camelized□ (as defined herein) immunoglobulin sequences, as well as immunoglobulin sequences that have been obtained by techniques such as affinity maturation (for example, starting from synthetic, random or naturally occurring immunoglobulin sequences), CDR grafting, veneering, combining fragments derived from different immunoglobulin sequences, PCR assembly using overlapping primers, and similar techniques for engineering immunoglobulin sequences well known to the skilled person; or any suitable combination of any of the foregoing. Reference is for example made to the standard handbooks, as well as to the further description and prior art mentioned herein.

[0061] Similarly, the nucleotide sequences of the invention may be naturally occurring nucleotide sequences or synthetic or semi-synthetic sequences, and may for example be sequences that are isolated by PCR from a suitable naturally occurring template (e.g. DNA or RNA isolated from a cell), nucleotide sequences that have been isolated from a library (and in particular, an expression library), nucleotide sequences that have been prepared by introducing mutations into a naturally occurring nucleotide sequence (using any suitable technique known per se, such as mismatch PCR), nucleotide sequence that have been prepared by PCR using overlapping primers, or nucleotide sequences that have been prepared using techniques for DNA synthesis known per se.

[0062] The amino acid sequence of the invention may in particular be a domain antibody (or an amino acid sequence that is suitable for use as a domain antibody), a single domain antibody (or an amino acid sequence that is suitable for use as a single domain antibody), a “dAb” (or an amino acid sequence that is suitable for use as a dAb) or a Nanobody™ (as defined herein, and including but not limited to a V_{HH} sequence); other single variable domains, or any suitable fragment of any one thereof. For a general description of (single) domain antibodies, reference is also made to the prior art cited above, as well as to EP 0 368 684. For the term□ dAb□s□, reference is for example made to Ward et al. (Nature 1989 Oct 341 (6242): 544-6), to Holt et al., Trends Biotechnol., 2003, 21(11):484-490; as well as to for example WO 06/030220, WO 06/003388 and other published patent applications of Domantis Ltd. It should also be noted that, although less preferred in the context of the present invention because they are not of mammalian origin, single domain antibodies or single variable domains can be derived from certain species of shark (for example, the so-called □ IgNAR domains□, see for example WO 05/18629).

[0063] In particular, the amino acid sequence of the invention may be a Nanobody® (as defined herein) or a suitable fragment thereof. [Note: Nanobody®, Nanobodies® and Nanoclone® are registered trademarks of Ablynx N. V] Such Nanobodies directed against Integrins will also be referred to herein as □Nanobodies of the invention□.

[0064] For a general description of Nanobodies, reference is made to the further description below, as well as to the prior art cited herein. In this respect, it should however be noted that this description and the prior art mainly described Nanobodies of the so-called □_{H}3 class □ (i.e. Nanobodies with a high degree of sequence homology to human germline sequences of the V_{H}3 class such as DP-47, DP-51 or DP-29), which Nanobodies form a preferred aspect of this invention. It should however be noted that the invention in its broadest sense generally covers any type of Nanobody directed against Integrins, and for example also covers the Nanobodies belonging to the so-called □_{H}4 class□ (i.e. Nanobodies with a high degree of sequence homology to human germline sequences of the V_{H}4 class such as DP-78), as for example described in WO 07/118,670.

[0065] Generally, Nanobodies (in particular V_{HH} sequences and partially humanized Nanobodies) can in particular be characterized by the presence of one or more □Hallmark residues□ as de(scribed herein) in one or more of the framework sequences (again as further described herein).

[0066] Thus, generally, a Nanobody can be defined as an amino acid sequence with the (general) structure
[0067] FR1-CDR1-FR2-CDR2-FR3-CDR3-FR4
   in which FR1 to FR4 refer to framework regions 1 to 4, respectively, and in which CDR1 to CDR3 refer to the complementarity determining regions 1 to 3, respectively, and in which one or more of the Hallmark residues are as further defined herein.

[0068] In particular, a Nanobody can be an amino acid sequence with the (general) structure
[0069] FR1-CDR1-FR2-CDR2-FR3-CDR3-FR4
   in which FR1 to FR4 refer to framework regions 1 to 4, respectively, and in which CDR1 to CDR3 refer to the complementarity determining regions 1 to 3, respectively, and in which the framework sequences are as further defined herein.

[0070] More in particular, a Nanobody can be an amino acid sequence with the (general) structure
[0071] FR1-CDR1-FR2-CDR2-FR3-CDR3-FR4
   in which FR1 to FR4 refer to framework regions 1 to 4, respectively, and in which CDR1 to CDR3 refer to the complementarity determining regions 1 to 3, respectively, and in which:
[0072] i) preferably one or more of the amino acid residues at positions 11, 37, 44, 45, 47, 83, 84, 103, 104 and 108 according to the Kabat numbering are chosen from the Hallmark residues mentioned in Table A-3 below;
   and in which:
[0073] ii) said amino acid sequence has at least 80% amino acid identity with at least one of the amino acid sequences of SEQ ID NO□ s: 1 to 22, in which for the purposes of determining the degree of amino acid identity, the amino acid residues that form the CDR sequences (indicated with X in the sequences of SEQ ID NO□ s: 1 to 22) are disregarded.

[0074] In these Nanobodies, the CDR sequences are generally as further defined herein.

[0075] Thus, the invention also relates to such Nanobodies that can bind to (as defined herein) and/or are directed against Integrins, to suitable fragments thereof, as well as to polypeptides that comprise or essentially consist of one or more of such Nanobodies and/or suitable fragments.

[0076] SEQ ID NO□ s 1316 to 1487 (see Table 1) give the amino acid sequences of a number of V_{HH} sequences that have been raised against Integrins.

TABLE 1
Preferred VHH sequences or Nanobody sequences and their specificity (also
referred herein as a sequence with a particular name or SEQ ID NO: X,
wherein X is a number referring to the relevant amino acid sequence):

| | | SEQ | |
|---|---|---|---|
| | | ID | |
| | | NO: | |
| | | X, | |
| | | wherein | |
| Name | Specificity | X = | Amino acid sequence |
| 138-G2, | alphaL | 1316 | EVQLVESGGGLVQPGGSLRLSCAASGFTLDYYNIGWFRQAP |
| 235-E10 | | | GEEREGVSCVSSSGGSTYYADSVKGRFTISRDNAKNTVYLQ |
| | | | MNSLKPEDTAVYYCATLNLFTTCDGPWGYEYDYYGQGTQV |
| | | | TVSS |
| 138- | alphaL | 1317 | EVQLVESGGGLVQPGGSLRLSCAASGFTLDYYNIGWFRQAP |
| H5, 235A6, | | | GKEREGVSCVSSSGGSTYYADSVKGRFTISRDNAKNTVYLQ |
| 243B9 | | | MNSLKPEDTAVYYCATLNLFTTCDGPWGYEYDYYGQGTQV |
| | | | TVSS |
| 235-E9 | alphaL | 1318 | XVQLVESGGGLVQPGGSLRLSCAASGFTLDYYAIGWFRQAP |
| | | | GKEREGVSCISSSDGSTYYADSVKGRFTISRDNAKNTVYLQ |
| | | | MNSLKPEDTAVYYCATLNLFTTCDGPWGYEYDYYGQGTQV |
| | | | TVSS |
| 138-D2 | alphaL | 1319 | EVQLVESGGGLVQPGGSLRLSCAASGFTLDYYNIGWFRQAP |
| | | | GKEREGVSCVSDSGGSTYYADSVKGRFTISRDNAKNTVYLQ |
| | | | MNSLKPEDTAVYYCATLNLFTTCDGPWGYEYDYYGQGTQV |
| | | | TVSS |
| 138-E4 | alphaL | 1320 | EVQLVESGGGLVQPGGSLRLSCAASGFTLDSYNIGWFRQAP |
| | | | GEEREGVSCVSSSGGSTYYADSVKGRFTISRDNAKNTVYLQ |
| | | | MNSLKPEDTAVYYCATLNLFTTCDGPWGYEYDYYGQGTQV |
| | | | TVSS |
| 138-B10 | alphaL | 1321 | EVQLVESGGGLVQAGGSLRLSCAASGFTADDYAIGWFRQAP |
| | | | GKEREGVSCISSSDGSTFYADSVKGRFTISSDNAKNTVYLQM |
| | | | NSLKPEDTAVYYCAADPRFEPTLLCTDYDYEDYWGQGTQV |
| | | | TVSS |
| 138-G11 | alphaL | 1322 | EVQLVESGGGLVQPGGSLRLSCAASGFTFDDYAIGWFRQAP |
| | | | GKEREGVSCISSSDGSTFYANSVKDRFTVSSDNAKNTVYLQ |
| | | | MNSLKPEDTAVYYCAABPXLSPQTYCTDYDYSYWGQGTQV |
| | | | TVSS |
| 138-D7 | alphaL | 1323 | EVQLVESGGGLVQAGGSLRLSCAASGFTFDDYAIGWFRQAP |
| | | | GKEREGVSCISSSDGYTYYADSVKDRFTISSDDAKNTVYLQ |
| | | | MNSLKPEDTAVYYCAATPRRFGWCSDYBEYDYWGQGTQV |
| | | | TVSS |
| 138- | alphaL | 1324 | EVQLVESGGGLVQAGGSLRLSCAASGFTFDDYAIGWFRQAP |
| H7, 152- | | | GKEREGVSCISSSDGYSFYANSVKGRFTISSDNAKNTVYLQM |
| B7 | | | NSLKPEDTAVYYCAATPRRFGWCSDYDEYDYWGQGTQVT |
| | | | VSS |
| 138-D11 | alphaL | 1325 | EVQLVESGGGLVXAGGSLRLSCAXSGFXFDDYAIGWFRQAP |
| | | | GEEREGVSCISSSDGYTYYAHSVKDRFTISSDNAKNTMYLQ |
| | | | MNSLKPEDTAVYYCAATPRRFGWXSDYDXYDYWGQGTQV |
| | | | TVSS |
| 138-C10 | alphaL | 1326 | XVQLVESGGGLVQAGGSLRLSCAASGFTFDDYVIGWFXQAP |
| | | | GKEREGVSCISSSEGYTFYADSVKDRFTISXDNAKNTVSLQM |
| | | | NSLKPEDTAVYYCAAXRKIIGLWCSDYDNYDYWGQGTQVT |
| | | | VSS |
| 235-B7 | alphaL | 1327 | EVQLVESGGGLVRAGGSLRLSCTASGNILNIASMGWYRQAP |
| | | | GKQRTWVARIRSDGTTSYQDAVKGRFTIAKDNAKNAGYLQ |
| | | | MDNLKPEDTAVYYCNAAGSTIDGGFSSWGPGTQVTVSS |
| 248-F2 | alphaL | 1328 | EVQLVESGGGLVRAGGSLRLSCTASGNILNIASMGWYRQAL |
| | | | GKQRTWVARIRSDGTTSYQDAVKGRFTIAKDNAKNAGYLQ |
| | | | MDNLKPEDTAVYYCNAAGSTIDGGFSSWGPGTQVTVSS |
| 248- | alphaL | 1329 | EVQLVESGGGLVQAGGSLRLSCAASGSGFNIVNAGWYRQGP |
| F7, D8 | | | EKQRELVARITSGGTTNYAESVKGRFTISRDNAKNTVYLQM |
| | | | NSLKPEDTAVYSCNARVIAPGRLDDIWGQGTQVTVSS |
| 248-H7 | alphaL | 1330 | EVxLVESGGGLVQAGGSLRLSCAASGSGFNIVNAGWYRQGP |
| | | | GKQREFVARITSGGTTNYAESVKGRFTISRDNAKNTVYLQM |
| | | | NSLKPEDTAVYSCNARVIAPGRLDDIWGQGTQVTVSS |
| 248-D7 | alphaL | 1331 | EVQLVESGGGLVQPGGSLRLSCAASGFAFSSYAMSWVRQAP |
| | | | GKGVEWVSAINSGGGSTSYLNSVKGRFTISRDDAKNTLYLQ |
| | | | MNSLKPEDTAVYYCAKPIYYSPNTYPPTSRYDYRGQGTQVT |
| | | | VSS |
| 236- | alphaL | 1332 | KVQLVESGGGLVQPGGSLRLSCAASGFAFSSYVMTWVRQA |
| B4, A5, | | | PGKGLEWVSSITSGGGYTSYLNSVKGRFTISRDDAKNTLYLQ |
| 248-G8 | | | MNSLKPEDTAVYYCAKPTFYSPNMYPPTSRYDYRGQGTQV |
| | | | TVSS |
| 248-E8 | alphaL | 1333 | EVQLVESGGGLVQPGGSLRLSCAASGFAFSSYVMTWVRQAP |
| | | | GKGLEWVSSITSGGGYTSYVNSVKGRFTISRDDAKNTLYLQ |
| | | | MNSLKPEDTAVYYCAKPTFYSPNMYPPTSRYDYRGQGTQV |
| | | | TVSS |
| 248-C8 | alphaL | 1334 | EVQLVESGGGLVQAGGSLRLSCAASGFTLDAYAIGWFRQAP |
| | | | GKEREGVSCISSSDGSTFYADSVKDRFTISSDNAKNTVYLQM |
| | | | NSLKPEDTAVYYCAADRRGKSEMYCTDYSYSDAWGQGTQ |
| | | | VTVSS |
| 236-E11 | alphaL | 1335 | EVxLVESGGGLVQAGGSLRLSCAASGFTLDAYAIGWFRQAP |
| | | | GKEREGVSCISSSDGSRFYADSVKDRFTISSDNAKNTVYLQM |
| | | | NSLKPEDTAVYYCAADRRGKSEMYCTDYAYSDAWGQGTQ |
| | | | VTVSS |
| 235-F3 | alphaL | 1336 | EVQLVESGGGLVQAGGSLTLSCALSGGSSSIANSAWYRQAP |
| | | | GNQRELVARITSNDNTYYADSVKGRLTISKDNAKNTASLQM |
| | | | NSLKPEDTAVYYCFVRTVGTGSLFDYWGQGTQVTVSS |
| 248- | alphaL | 1337 | EVQLVESGGGLVQAGGSLTLSCALSGGSSSIANSAWYRQAP |
| F1, G1 | | | GNQRELVARITSNDNTYYADSVKGRFTISKDNAKNTASLQM |
| | | | NSLKPEDTAVYYCFVRTVGTGSLFDYWGQGTQVTVSS |
| 248-G2 | alphaL | 1338 | EVQPVESGGGLVQAGGSLTLSCALSGGSSSIANSAWYRQAP |
| | | | GNQRELVARITSNDNTYYADSVKGRFTISKDNAKNTASLQM |
| | | | NSLKPEDTAVYYCFVRTVGTGSLFDYWGQGTQVTVSS |
| 138- | alphaL | 1339 | EVQLVESGGGLVQAGGSLRLSCAASGFTFDDYAIGWFRQAP |
| G4, G5 | | | GKEREGVSCISSSHGSTFYADSVKDRFTISSDNAKNTVYLQM |
| | | | NSLKPEDTAVYYCAAALGGGSSWCTTYEYDAWGQGTQVT |
| | | | VSS |
| 235- | alphaL | 1340 | EVQLVESGGGLVQSGGSLRLSCAASGSIVGISDMRWYRQAP |
| A12, 248- | | | GNQRELAASISRGGSTNYGDFVKGRFTISRDNAKNTVSLQM |
| B1, C1, E1, | | | SSLEPEDTAVYYCNAAVAAGTVGAYTLRNYWGQGTQVTVS |
| H2 | | | S |
| 248-B7 | alphaL | 1341 | KVQLVESGGGLVQAGGSLRLTCAASGSILSVSTMTWYRQVL |
| | | | GTQRELVASITRSGGSNYADPVKGRFTIARDNAKNTMYLQM |
| | | | NSLKPEDTAIYYCNAVIASNSGRSYDLRNYWGQGTQVTVSS |
| 248-A1 | alphaL | 1342 | EVQLVESGGGLVQPGGSLRLSCTASGSVFSIGNMGWYRQAP |
| | | | GKQRELVATITQAGSPNYSQSAKGRFTISRDVPKNTVSLQMN |
| | | | SLKPEDTAVYYCNGNIVTYDRGRTTVKNYWGQGTQVTVSS |
| 248- | alphaL | 1343 | EVQLVESGGGLVQPGGSLRLYCAAPGTMYSFIEMGWYRQA |
| D2, D1, | | | PGKQRELVAHITSGGSTKYADSVKGRFTISRDLSLQMNNLNP |
| E2 | | | EDSAVYLCNMKGTDRRSYWGQGTQVTVSS |
| 248-A7 | alphaL | 1344 | XVQLVESGGGLVQAGGSLRLSCAASGFTFDDYAIGWFRQAP |
| | | | GKEREGVSCISRSAGSKYYADSVKDRFTISSDNAKNTVSLQM |
| | | | NSLKPEDTAVYYCAAYRAIGHFCTDYXDFVSWGQGTQVTV |
| | | | SS |
| 153-G1 | beta2 | 1345 | EVQLVESGGGLVQAGGSLRLSCTVSGSTGSINAMGWYRQAP |
| | | | GKQRELVAIIYSSGRIDYADSVKGRFTISRDNAKNTVYLQMN |
| | | | NLQPDDTAAYYCNAANPNTGWQRPHRASWGQGTQVTVSS |
| 138-C2 | beta2 | 1346 | EVQLVESGGGVVQAGGSLRLSCTVSGSTGSINAMGWYRQA |
| | | | PGKQRELVAIIYSSGTIBYADSVKGRFTISRDNAKNTVYLQM |
| | | | NSLKPDDTAAYYCNAANPNTGWQRPHRASWGQGTQVTVSS |
| 139-C2 | beta2 | 1347 | EVQLVESGRGLVQAGGSLRLSCTVSGSTGSINAMGWYRQAP |
| | | | GKQRELVAIIYSSGRIDYADSVKGRFTISRDNAKNTVBLQMN |
| | | | SLKPDDTAAYYCNAANPNTGWQRPHRASWGQGTQVTVSS |
| 235-E3 | beta2 | 1348 | EVQLVESGGGLVQAGGSLRLSCTVSGSTGSINVMGWYRQAP |
| | | | GKQRELVAIIYSSGTLDYADSVKGRFTISRDNAKNTVYLQM |
| | | | NSLKPDDTAAYYCNAAMQDSAWLRPHRASWGQGTQVTVS |
| | | | S |
| 152-C6 | beta2 | 1349 | EVQLVESGGGLVQAGGSLRLSCTVSGSTGSINAMGWYRQAP |
| | | | GR*RELVAIIYSSGRIDYADSVKGRFTISRDNAKNTVDLQMN |
| | | | SLKPDDTAAYYCNAANPNTGWQRPHRASWGQGTQVTVSS |
| 153-G1 | beta2 | 1350 | EVQLVESGGGLVQAGGSLRLSCTVSGSTGSINAMGWYRQAP |
| | | | GKQRELVAIIYSSGRIDYADSVKGRFTISRDNAKNTVYLQMN |
| | | | NLQPDDTAAYYCNAANPNTGWQRPHRASWGQGTQVTVSS |
| 138- | beta2 | 1351 | EVQLVESGGELVQAGGSLRLSCAASGSVSSINVMGWYRQAP |
| A2, E5, F5, | | | GKQRELVATISSSGYTDYSDSAKGRFTISRDNKNTVHLQMNS |
| 139- | | | LKPEDTAVYYCRASTLRTGWFTGWGQGTQVTVSS |
| G2, 152- | | | |
| A6, 153- | | | |
| B5, B6, F5, | | | |
| 253- | | | |
| D3, G3 | | | |
| 152- | beta2 | 1352 | EMQLVESGGELVQAGGSLRLSCAASGSVSSINVMGWYRQA |
| D4, E4 | | | PGKQRELVATISSSGYTDYSDSAKGRFTISRDNKNTVHLQMN |
| | | | SLKPEDTAVYYCRASTLRTGWFTGWGQGTQVTVSS |
| 152-F2 | beta2 | 1353 | EVQLVESGGELVQAGGSLRLSCAASGSVSSINVMGWYRQAP |
| | | | GKQRELVATISSSGCTDYSDSAKGRFTISRDNKNTVHLQMNS |
| | | | LKPEDTAVYYCRASTLRTGWFTGWGQGTQVTVSS |
| 138-B2 | beta2 | 1354 | AEVQLVESGGELVQAGGSLRLSCAAPGSVSSINVMGWYRQ |
| | | | APGKQRELVATISSSGYTDYADSAKGRFTISRDNKNTVHLQ |
| | | | MNSLKPEDTAVYYCRASTLRTGWFTGWGQGTQVTVSS |
| 153-D4 | beta2 | 1355 | EVQLVESGGGLVQAGRSLRLSCAASGSVSSINVMAWYRQAP |
| | | | GKQRELVATISSSGYTDYSDSAKGRFTISRDDXNTVHLQMNS |
| | | | LKPEDTAVYYCRASTARTGWLRAWGQGTQVTVSS |
| 153- | beta2 | 1356 | EVQLVESGGGLVQAGGSLRLSCAASGSVSSINVMGWYRQAP |
| G2,F4 | | | GKQRELVATISSSGYTDYSDSAKGRFTISRDNENTVHLQMNS |
| | | | LKPEDTGVYYCRASTARTGWLXPWGQGTQVTVSS |
| 153-G5 | beta2 | 1357 | EVQLVESGGGLVQAGGSLRLSCAASGSVSSTNVMAWYRQAP |
| | | | GKERELVATISTTGYTDYSXSAKGRFTISRDSKNTVHLQMNS |
| | | | LKPEDTAVYYCRASTLRTGWLMGWGQGTQVTVSS |
| 153-H2 | beta2 | 1358 | XVQLVESGGGLVQAGGSLRLSCAAXGSVSSINVMGWYRQA |
| | | | PGKQRELVATISTTGYTDYSXSAKGRFTISRDNKNTVHLQM |
| | | | NSLKPEDTAVYYCRASTLRTGWLKGWGQGTQVTVSS |
| 153-H4 | beta2 | 1359 | EVQLVESGGGLVQAGGSLRLSCAASGSVSSINVMAWYRQAP |
| | | | GKQRELVATISSTGYTDYSDSAKGRFTISRDNKNTVHLQMN |
| | | | SLKPEDTAVYYCRASTLRTGWFMGWGQGTQVTVSS |
| 152-C4 | beta2 | 1360 | EVQLVESGGGLVQAGGSLRLSCATSGSVSSINVMAWYRQAP |
| | | | GKQRELVATISTSGYTDYSDSAKGRFT1SRDNKNTVHLQMN |
| | | | SLKPEDTAVYYCRASTLRTGWLMGWGQGTQVTVSS |
| 152-F4 | beta2 | 1361 | EVQLVESGGGLVQAGGSLRLSCAASGSVSSINVMAWYRQAP |
| | | | GKQRELVATISTSGYTDYSDSAKGRFTISRDNKNTVHLQMN |
| | | | SLKPEDTAVYYCRASTLRTGWLMGWGQGTQVTVSS |
| 152-E1 | beta2 | 1362 | EVQLVESGGGLVQAGGSLRLSCAASGSVSAINVMAWYRQA |
| | | | PGKQRELVATISSTGYTDYSDSAKGRFTISRDNKNTVYLQM |
| | | | NSLKPEDTAIYYCRASTLRTGWLMGWGQGTQVTVSS |
| 152-H4 | beta2 | 1363 | EVxLVESGGGLVQAGGSLRLSCAASGSISSINLMGWYRQAPG |
| | | | KQRELVATISSTAYTDYSDSAKGRFTISRDNKNTVHLQMNSL |
| | | | KPEDTAVYYCRASTLRTGWLPGWGQGTQVTVSS |
| 235- | beta2 | 1364 | EV*LVESGGGLVQAGRSLRLSCAASGSVSSINVMAWYRQAP |
| C10, D10 | | | GKQRELVATISSSGYTDYSDSAKGRFTISRDDENTVHLQMNS |
| | | | LKPEDTAVYYCRASTARTGWLRAWGQGTQVTVSS |
| 235-C3 | beta2 | 1365 | XVQLVESGGGLVQAGGSLRLSCAASGSVSAINVMAWYRQA |
| | | | PGKQRELVATVSTTGYTDYSDSAKGRFTISRDNKNTVYLQM |
| | | | NSLKPEDTAIYYCRASTLRTGWLMGWGQGTQVTVSS |
| 139- | beta2 | 1366 | EVQLVESGGGLV*PGRSLXLSCAASGSIFGGNTMGWFRQAP |
| A10, 153- | | | GKRREMVATITSHGTGDYTGSVEGRFTISRDNAKNTVYLQM |
| D7, F7, E8, | | | NSLKPEDTAVYYCNSLIGWARNDYWGRGTQVTVSS |
| 152- | | | |
| A8, 236- | | | |
| A11, C5, | | | |
| F5, 248-F8 | | | |
| 139- | beta2 | 1367 | EVQLVESGGGLVQAGGSLRLSCAASGSRLRFELMGWYRQA |
| F10, 152- | | | PGKPRDLVALITSSGSANYADSVKGRFT1SRDNAKNTLYLQM |
| F11, H11, | | | NSLKPEDTGVYYCNAHTYTDNLWGQGTQVTVSS |
| C12, 153- | | | |
| G10 | | | |
| 153-B7, | beta2 | 1368 | XVQLVESGGGLVQAGGSLRLSCAASGSRLRFELMGWYRQA |
| E9 | | | PGKPRDLVALITSSGSANYADSVKGRFTISRDNAKNTLYLQM |
| | | | NSLKPEDTGVYYCNAHTYTDNLWGQGTQVTVSS |
| 152-H10 | beta2 | 1369 | EVQLVESGGGVVEAGGSLRLSCAATGSRFRFEIMGWYRQAP |
| | | | GKPRDLVALITRSGSANYADSVKGRFTISRDSAKNTLYLQM |
| | | | NSLKPEDTGVYYCNAHTYTDNLWGQGTQVTVSS |
| 152-B10 | beta2 | 1370 | EVQLVESGGGLVQAGGSLRLSCAASGSRFRFEIMGWYRQAP |
| | | | GKPRDLVALITSSGSANYADSVKGRFTISRDNAKNTLYLQM |
| | | | NSLKSEDTGVYYCNAHTYTDNLWGQGTQVTVSS |
| 139-D10 | beta2 | 1371 | EMQLVESGGGLVQAGGSLRLSCAASGSRLRFELMGWYRQA |
| | | | PGKPRDLVALITSSGSANYADSVKGRFTISRDNAKNTLYLQM |
| | | | NSLKPEDTGVYYCNAHTYTDNLWGQGTQVTVSS |
| 153-A10 | beta2 | 1372 | XVQLVESGGGLVQAGGSLRLSCAASGSRFRFEIMGWYRQAP |
| | | | GKPRDLVALITNSGSANYABSVKGRFTISRDNAKNTLYLQM |
| | | | NSLKPEDTGVYYCNAHTYTDSLWGQGTQVTVSS |
| 153-C7 | beta2 | 1373 | KVQLVESGGGLVQAGGSLRLSCAASGSRFRFELMGWYRQA |
| | | | PGKPRDLVALITSSGSANYAESVKGRFTISRDNAKNTLYLQM |
| | | | NSLKPEDTGVYYCNAHTYTDNLWGQGTQVTVSS |
| 153- | beta2 | 1374 | EVQLVESGGGLVQAGGSLRLSCAASGSRFRFELMGWYRQA |
| C9, 152- | | | PGKPRDLVALITSSGSANYADSVKGRFTISRDNAKNTLYLQM |
| A12, B9, | | | NSLKPEDTGVYYCNAHTYTDNLWGQGTQVTVSS |
| H7, H8, | | | |
| 236- | | | |
| D11, A12, | | | |
| C11, 248- | | | |
| B8, E7 | | | |
| 152-G9 | beta2 | 1375 | EVQLVESGGGLVQVGGSLRLSCAASGSRFRFELMGWYRQA |
| | | | PGKPRDLVALITSSGSANYADSVKGRFTISRDNAKNTLYLQM |
| | | | NSLKPEDTGVYYCNAHTYTDNLWGQGTQVTVSS |
| 153-F9 | beta2 | 1376 | EVQLVESGGGLVQAGGSLRLSCAASGSRLRFELMGWYRQA |
| | | | PGKPRDLVALITSSGSANYADSVKGRFTISRDNAKNTLYLQM |
| | | | NSLEPEDTGVYYCNAHTYTDNLWGQGTQVTVSS |
| 248-G7 | beta2 | 1377 | EVQLVESRGGLVQAGGSLRLSCAASGSRLRFELMGWYRQA |
| | | | PGKPRDLVALITSSGSANYADSVKGRFTISRDNAKNTLYLQM |
| | | | NSLKPEDTGVYYCNAHTYTDNLWGQGTQVTVSS |
| 236-B11 | beta2 | 1378 | EVQLVESGGGLVQAGGSLRLSCAASGSRFRFELMGWYRQA |
| | | | PGKPRDLVALITRSGSANYADSVKGRFTISRDNAKNTLYLQ |
| | | | MNSLKPEDTGVYYCNAHTYTDNLWGQGTQVTVSS |
| 236-D5 | beta2 | 1379 | EVQLVESGGGLVRAGGSLRLSCAASGSRFRFEIMGWYRQAP |
| | | | GSARDLVALITNSGSANYADSVKGRFTISRDNAKNTFYLQM |
| | | | NSLKPEDTGVYYCNAHTYTDNLWGQGTQVTVSS |
| 236-E12 | beta2 | 1380 | EVQLVESGGXLVQAEGSLRLSXAASGSRFRFELMGWYRXAP |
| | | | GKPRDLVALITXSGSANYADSVKGRFTISRXNAXNTLYLQM |
| | | | NSLKPEDTGVYYCNXHTYTDNLWGQGTQVTVSS |
| 236- | beta2 | 1381 | EVQLVESGGGLVQAGGSLRLSCAASGSRFRFEIMGWYRQAP |
| B5, F11, | | | GRMRDLVALITSSGSTNYADSVKGRFTISRDNAKNTLYLQM |
| 152-G10 | | | NSLKPEDTGVYYCNAHTYTDNLWGQGTQVTVSS |
| 153- | beta2 | 1382 | EVQLVESGGGLVQAGGSVRLSCAASGVTFRFVLMGWYRQA |
| A8, B11 | | | PGKQRELVAQITSSDATNYADSVKGRFTISRDNAKKTVDLQ |
| | | | MNSLKPEDTAVYYCLLARGPDVYWGQGTQVTVSS |
| 152- | beta2 | 1383 | KV*LVESGGGLVQAGGSVXLSCAASGVIFRFVLMGWYRXA |
| C9, 236- | | | PGKQRELVAQITSSDATNYADSVKGRFTISRDNAKKTVDLQ |
| E5 | | | MNSLKPEDTAVYYCLLARGPDVYWGQGTQVTVSS |
| 138- | beta2 | 1384 | EVQLVESGGGLVQAGGSQKLSCAASGSTLIYTMGWYRQAL |
| H2, 248- | | | GKKRVFVASISRDGSTIYGDSVKGRFTISRDNAKNTAYLQM |
| C2 | | | NSLKPEDTAVYVCKAEGWYQGYWGQGTQVTVSS |
| 138-B5 | beta2 | 1385 | EVQLVESGGGLVQAGGSLRLSCAASGSTEIYTMGWYRQAPG |
| | | | KQRVFVASISRDGSTIYGDSVKGRFTISRDSAKNTAYLQMNR |
| | | | LKPEDTAVYVCKAXGWYNGYWGQGTQVTVSS |
| 248-H1 | beta2 | 1386 | EVQLVESGGGLVQAGGSQKLSCAASGSTLIYTMGWYRQAL |
| | | | GKKRVFVASISRDGSTIYGDSVKGRFTISRDNAKNTAYLQM |
| | | | NNLKPEDTAVYVCKAEGWYQGYWGQGTQVTVSS |
| 138- | beta2 | 1387 | EVQLVESGGGLVQAGGSLRLSCAASGNTFSINAVGWYRQAP |
| A5, 139- | | | EKQRELVAIILSSGTTDYADSVKGRFTISRDNAKNIVYLQMN |
| E2, 235- | | | SLKPEDTAVYYCRVADREMGWAYWGQGTQVTVSS |
| E6 | | | |
| 152-G2 | beta2 | 1388 | EVQLVESGGGLVQAGGSLRLSCAASGNTFSINAVGWYRQAP |
| | | | EKQRELVAIIXSXGTTDYADSVKGRFTISRDNAKNTVYLQM |
| | | | NSLKPEDTAVYYCXXXDRXMGXAYWGQGTQVTVSS |
| 153- | beta2 | 1389 | EVQLVESGGGLVQTGGSLRLSCAASGSIFMILAMGWYRQAP |
| E10, D8, | | | GKQRELVTTIIRDGKTYYSDSVKDRFTISRDNAKNTAYLQM |
| G7 | | | NSLKPEDTAVYYCYTKVIVMGAGMDDNDFFGQGTQVTVSS |
| 235- | beta2 | 1390 | EVQLVESGGGLVQPGGSLRLSCAASGSILSRTDVDWYRQAP |
| D5, 153- | | | GKGREWVAIIAPFGTTNSRDSRFTISRDNAKNIVYLQMNSLE |
| A1 | | | PEDTAVYYCRIYWGGNVYWGQGTQVTVSS |
| 138-F2 | beta2 | 1391 | EVQLVESGGGLVQAGGSLRLSCAPSSSAVSIVHIQWHRQAPG |
| | | | KQRELVASVNSRGTTNYADSVKGRAIISRDNAKNTVYLQMN |
| | | | SLKPEDTAVYYCYARTLQLGALRDYWGQGTQVTVSS |
| 139-H10 | beta2 | 1392 | EVQLVESGGGLVQAGGSLRLSCAASASILSINTMDWFRRTPG |
| | | | KQRELVSTITRDGRTTYADSVKGRFTLSRDNTKNTVSLQMN |
| | | | SLKPEDTAVYYCLANVETTRGLTKNYWGQGIQVTVSS |
| 139- | beta2 | 1393 | EVQLVESGGGLVQTGGSLRLSCAASGSTFNINAWGWYRQAP |
| B2, 152- | | | GKQRELVAVISSSGSTDYSDAVKGRFTISTVNAGNTVYLEM |
| E2, 235- | | | NSLKPEDTAVYYCRAADSGPWRYWGQGSQVTVSS |
| C9D9 | | | |
| 248C7 | beta2 | 1394 | EVQLVESGGGKVQAGMSQRLSCAASGGIGTFSSVAWYRQA |
| | | | PGKQRELVAQITHEGTRNYADSVKGRFTISREFTLSRDGPKE |
| | | | MVHLQMVSLKPEDTAVYYCNAVQFGRNYWGQGTQVTVSS |
| 139- | alpha | 1395 | EVQLVESGGGLVQAGGSLRLSCAASGSIFSINYMGWYRQAP |
| B7, B10, | M | | GKQREAVAIIDRVGASTNYVDSVRGRFTISRSNAKNENMLY |
| C11 | | | LQMNSLKPEDTAVYYCNTVPTTSAYWGPGTQVTVSS |
| 139-C7 | alpha | 1396 | XVQLVESGGGLVQAGGSLRLSCAATGTIFSSNYMGWYRQA |
| | M | | PGLQRESVAIIDRGGASTNYVXSVRGRFTISRSNAKNQSMLY |
| | | | LQMNSLKPEDTAVYYCNTVPTTSAYWGPGTQVTVSS |
| 139-H9 | alpha | 1397 | EVQLVESGGGLVQAGGSLRLSCAASGSIFSISYMGWYRQAP |
| | M | | GKERESVAIIDRSGASTNYVDSVRGRFT1SRSNAKNKNMLYL |
| | | | QMNSLKPEDTAVYYCNTVPTTSAYWGPGTQVTVSS |
| 139-C10 | alpha | 1398 | EVQLVESGGGLVQAGGSLKLSCVASGLILSIHTMGWYRQAP |
| | M | | GKQREFVAVASNSGRTNYADSVKGRFTISRDNAKNTVYLQ |
| | | | MNNLKPEDTAVYYCNSASQFASWGQGTQVTVSS |
| 139-H11 | alpha | 1399 | EVQLVESGGGLVQAGGSLRLSCAASGIIFSTYTMGWYRQAPG |
| | M | | KQREFVAAATNAGTTSYAGSVKGRFTISRDNAKNTVILQMN |
| | | | NLKPEBTAVYYCRVLDYDYWGQGTQVTVSS |
| 139-D2 | alpha | 1400 | EVQLVESGGGLVQPGGSLRLSCAASRIIFSRNVMAWYRQAP |
| | M | | GKEREPVAIITTAHSTNYVDSVKGRFTISRDNAKNTLYLEMN |
| | | | SLKPEDTGVYYCNKLPHYPTDSWGQGTQVTVSS |
| 243-G9 | alpha | 1401 | EVQLVESGGGLVQPGGSLRLSCAASRSIFSRNAMAWYRQAP |
| | M | | GKQREPVAIITSNHGTNYVDPVKGRFTISRDNAKNTLYLQM |
| | | | NSLKPEDTGVYYCNK1PHYTVDSWGQGTQVTVSS |
| 243-C9 | alpha | 1402 | KVQLVESGGGLVQAGGSLRLSCTASGNIARITAFGWYRQAP |
| | M | | GRQRDFVAGIFSGALTNYADSVKGRFTISRDNAKNTVFLQM |
| | | | NSLKTEDTGTYYCRSDNNWGQGTQVTVSS |
| 243-A9 | alpha | 1403 | EVQLVESGGGLVQAGGSLRLSCTASGSDVRITAFAWYRQAP |
| | M | | GKQRDFVAGIFSGAITNYADSVKGRFTISRDNAKNTVFLQM |
| | | | NSLKTEDTATYYCRADNNWGQGTQVTVSS |
| 139-E9 | alpha | 1404 | EVQLVESGGGLVQAGGSLRLSCVASGFIFSIYGMAWYRQAP |
| | M | | GKQRELVASITGGYGPNYVDSVKGRFTISRDDAKNTLYLQM |
| | | | NSLKPEDTAVYYCNQLYSDYWGKGTQVTVSS |
| 139-H7 | alpha | 1405 | EVQLVASGGGLVQTGGSLRLSCAASGSGFSIDGMNWSRQAP |
| | M | | GKGRELVGY1TSSGSTDYADSVKGRFT+SRDNADNTVYLQM |
| | | | NSLKPEDTAVYYCAVATRSRLGLQQNYWGQGTQVTVSS |
| 139-H1 | alpha | 1406 | EVQLVESGGGLVQAGGSLRLSCAASGIIFTIYTMAWYRQAP |
| | M | | GKQRELVAAVTYAGNRYYVDSVKGRFTISRDDAKNKVYLQ |
| | | | MNSLKPEDTAVYYCAANPSDNPWLGQGTQVTVSS |
| 243-H9 | alpha | 1407 | EVQLVESGGGLVQPGGSLRLSCAASGSIRSIDAMAWYRQTP |
| | M | | GKQRDFVAAIFSGGLTHYADSVKGRFTISRDNAKNTLYLQM |
| | | | NSLKPEDTAVYYCKFRAPTGSDNWGQGTQVTVSS |
| 153-D3 | alpha | 1408 | EVQLVQSGGGLVQAGGSLRLSCAASGYIFSSNITGWYRQAP |
| | M | | GKQRELVAAISSDGLAHYTDSMKGRVIISRDNVENTVYLQM |
| | | | NSLKPEDTAVYYCAAPGAGRGQGTQVTVSS |
| 140-F10 | alphaV | 1409 | EVQLVESGGGSVQAGGSLRLSCAASQRTFSSDVMGWFRQAP |
| | beta6 | | GKERDFVAYIHRSGTTYYADSVKGRLTISRDNAKSTVYLQM |
| | | | NSLKPEDTAVYHCAAGRYGSTSDTLYDYWGQGTQVTVSS |
| 140-H10 | alphaV | 1410 | EVPLVESGGGSVQAGGSLRLSCAASQRTFSRDVTGWFRQAP |
| | beta6 | | GKERDFVAYIHRSGETTYYADSVKGRFTISRDNAKSTVYLQ |
| | | | MNSLKPEDTAVYHCAAGRYGSTSDTLYDYWGQGTQVTVSS |
| 140-B10 | alphaV | 1411 | EVQLVESGGGSV*AGGSLRLSCAASQRTFSSDVMGWFRQAP |
| | beta6 | | GKERDFVAYIHRSGTTYYADSVKGRFTISRDNAKSTVYLQM |
| | | | NSLKPEDTAVYHCAAGRYGSTADTLYDYWGQGTQVTVSS |
| 140-B8 | alphaV | 1412 | EVQLVESGGGSVQAGGSLrLSCAASQRTFSRDVMGWFRQAP |
| | beta6 | | GKERDFVAYSHRSGTTYYADSVKGRFTISRDNAKSTVYLQM |
| | | | NSLKPEDTAVYHCAAGRYGSTSDTLYDYWGQGTQVTVSS |
| 140-C8 | alphaV | 1413 | XVQLVESGGGSVQAGGSLrLSCAASQRTFSSDVMGWFRQAP |
| | beta6 | | GKEGDFVAYIHRSGTTYYADSVKGRFTISXDNAKSTVYLQM |
| | | | NSLKPEDTAVYHCAAGRYGSTSDTLYDYWGQGTQVTVSS |
| 140-D8 | alphaV | 1414 | EVQLVESGGGSVQAGGSLRLSCATSQRTFSSDVMGWFRQAP |
| | beta6 | | GKERDFVAYXHRSNTTYYADSVKGRFTISRDNAKSTVYLQ |
| | | | MNSLKPEDTAVYHCAAGRYGSTSDTLYDYWGQGTQVTVSS |
| 140-E5 | alphaV | 1415 | EVQLVESGVGLVQAGGSLrLSCAASGYTFNHNTMAWYRQA |
| | beta6 | | PGKQRELAASISSGGNTYYABSVKGRFTISRDNGNNTMYLQ |
| | | | MNNLKPEDTAVYYCNWKDWPPNYKNDYWGQGTQVTVSS |
| 140- | alphaV | 1416 | EVQLVESGGGLVQAGGSLRLSCAASGYTFNHNTMAWYRQA |
| F2, H5 | beta6 | | PVKQRELAASISSGGSTYYADSVKGRFTISRDNGNNTMYLQ |
| | | | MNNLKPEDTAVYYCNWKDWPPNYTNDYWGQGTQVTVSS |
| 140-E10 | alphaV | 1417 | EVQLVESGGGLVQAGESLKLSCVASGNILRVTSMGWGRQIP |
| | beta6 | | GKQRKLVAWITNEGRTEYADSVKGRFTISRDNAQNTLYLLM |
| | | | NSLKPEDTAVYYCYGFSPRESSGNTYWGQGTQVTVSS |
| 140-D10 | alphaV | 1418 | EVQLVESGGGLVQAGGSLRLSCAASGRIYSSNTMAWFRQAP |
| | beta6 | | GKEREFGSAIMWRGDATYTDYADSMKDRFTISRDNAKNTV |
| | | | YLQMNSLKPEDTATYYCAAGGRRWNTRKDSSQYDYWGQG |
| | | | TQVTVSS |
| 140-G8 | alphaV | 1419 | EVQLVESGGGSVQAGGSLRLSCTASGSIFSINDMGWYRQPPG |
| | beta6 | | EQRELVATLTSSDSTKYADSVKSRFTISRDNAKNTVYLQMN |
| | | | SLKPEDTAVYYCNAVINRRGDGRNWSREYWGQGTQVTVSS |
| 140-A10 | alphaV | 1420 | EVQLVESGGGLVQPGGSLrLSCAASGFTFSRMAMGWYRQAP |
| | beta6 | | GVERDFLAIISPGGGTNYADSVKGRFTISRDNAKNTVYLQM |
| | | | NSLKPEDTAVYYCNARNFEGRRVDYWGQGTQVTVSS |
| 140-A2 | alphaV | 1421 | EVQLVESGGGLVQAGGSLrLSCAASGSTYRLNNMAWYRQS |
| | beta6 | | PGKKRELVALISGITSDPSTYYLDSVRGRFSISRDNALNTVYL |
| | | | QMNSLKPEDTAVYYCKQAWAGVEYWGQGTQVTVSS |
| 140-H8 | alphaV | 1422 | EVQLVESGGGLVQAGGSLrLSCAASISANAIDVVSWYRQAPg |
| | beta6 | | KPRELAASITSAGRIKYAESVKGRFGISRDNAKNTVSLQMNS |
| | | | LKPEDTAVYYCNALYRNAIYWGQGTQVTVSS |
| 140-G10 | alphaV | 1423 | EVQLVESGGGLVQAGGSLXLSCAASGFTFDDYAIGWFRQAP |
| | beta6 | | GKEREGVSCIRNSDGRTYYADSVKGRFTISSDNAKNTVYLQ |
| | | | MNSLKPEDTALYYCAATQIGRPRGDKGANRYCSXSRDRGQ |
| | | | GTQVTVSS |
| 140-E2 | alphaV | 1424 | EVQLXESGGGLVQAGGSLXLSXAASGYIFSSNITGWYRQAP |
| | beta6 | | GKQRELVAAISSDGLAHYTDSMKGRVIISRXNVENTVYLQM |
| | | | NSLKPEDTAVYYCAAPGAGRGQGTQVTVSS |
| 140-D4 | alphaV | 1425 | EVQLVESGGGLVEAGGSLRLSCATSGSTFGIEAMAWYRQAP |
| | beta6 | | GKQRELVATINSASRTNYADSVKGRFTISRDTGKSILYLQMN |
| | | | NLEPEDTAVYYCKITTPLPYRRDFWGQGTQVTVSS |
| 140-A5 | alphaV | 1426 | EVQLVESGGGSVQAGGSLRLSCAASGTTATITVPGWYRQAP |
| | beta6 | | GKQRELVAVINSGGTKKYADSVKGRFTISIDNVKRTLYLEM |
| | | | NSLRPEDTAVYYCSTLKYWGQGTQVTVSS |
| 141-A10 | beta1 | 1427 | EVQLVESGGGLVQAGGSLRLSCAASGRTISRFTMGWFRQGP |
| | | | GKERDFVAAISWGGGRTNYEDSVKGRFTISRDNAQNTVYLQ |
| | | | MNSLKPEDTAVYYCAABSRGPYNSNWHQSSVSYDYWGQG |
| | | | TQVTVSS |
| 141- | beta1 | 1428 | EVQLVESGGGLVQAGGSLRLSCAASGRTISRFTMGWFRQAP |
| C10, 142- | | | GKERDFVAAISWGGGRTNYEDSVKGRFTISRDNAQNTVYLQ |
| C11, F7 | | | MNSLKPEDTAVYYCAABTRGPYNSNWAQSSVSYDGWGQG |
| | | | TQVTVSS |
| 141-E10 | beta1 | 1429 | EVQLVESGGGLVQAGGSLRLSCAASGRTISRFTMGWFRQAP |
| | | | GKEREFVAAISWGGGRTNYEDSVKGRFTISRDNAQNTVYLQ |
| | | | MNSLKPEDTAVYYCAABTRGPYNSNWAQSSVSYDYWGQG |
| | | | TQVTVSS |
| 141- | beta1 | 1430 | EVQLVESGGGLVQAGGSLRLSCAASGRTISRFTMGWFRQAP |
| F10, 142- | | | GKERDFVAAISWGGGRTNYEDSVKGRFTISRDNAQNTVYLQ |
| F10 | | | MNSLKPEDTAVYYCAABSRGPYNSNWHQSSVSYDYWGQG |
| | | | TQVTVSS |
| 141-A11, | beta1 | 1431 | EVQLVESGGGLVQAGGSLRLSCAASGRTISRFTMGWFRQAP |
| 242- | | | GKERDFVAAISWGGGRTNYEDSVKGRFTISRDNAQNTVYLQ |
| A12, B12, | | | MNSLKPEDTAVYYCAADTRGPYNSNWAQSSVSYDTWGQG |
| B4, C4, | | | TQVTVSS |
| D12, D4, E4, | | | |
| F12, F4, | | | |
| G12, B8, | | | |
| D8 | | | |
| 242-E8 | beta1 | 1432 | EVQLVESGGGLVQAGGSLRLSCAASGRTISRFTMGWFRQAP |
| | | | GKERDFVAAISWGGGRTNYEDSVKGRFT1SRDNAQNTVYLQ |
| | | | MNSLKPEDTAVYYCAADTRGPYNSNWAQSSVSYDGWGQG |
| | | | TQVTVSS |
| 141- | beta1 | 1433 | EVQLVESGGGLVQAGDSLRLSCAASGRTISRFTMGWFRQAP |
| C11, 242- | | | GKERDFVAAISWGGGRTNYEDSVKGRFTISRDNAQNTVYLQ |
| G4 | | | MNSLKPEDTAVYYCAADTRGPYNSNWAQSSVSYDGWGQG |
| | | | TQVTVSS |
| 142-C7 | beta1 | 1434 | EVQLVESGGGLVQAGGSLRLSCAASGRTISRFTMGWFRQAP |
| | | | GKERDFVAAISWGGGRTNYEDSVKGRFTISRDNAQNTVYLQ |
| | | | MNSLKPEDTAVYYCAABTRGPYNSNWHQSSVSYDAWGQG |
| | | | TQVTVSS |
| 142-B10 | beta1 | 1435 | EVQLVESGGGLVPAGGSLRLSCAASGRAISRFTMGWFRQAP |
| | | | GKERDFVAAISWGGGRTDYEDSVKGRFTISRDNARNTVYLQ |
| | | | MNSLKPEDTAVYYCAABTRGPYNSNWAQSSVSYNYWGQG |
| | | | TQVTVSS |
| 142-C9 | beta1 | 1436 | EVqLVESGGGLVQAGGSLRLSCAASGRTISRFTMGWFRQAP |
| | | | GKERDFVAAISWGGGRTKYEDSVTGRFTISRDNAQNTVYLQ |
| | | | MDSLKPEDTAVYYCAABSRGPYNSNWHQSSVSYDYWGQG |
| | | | TQVTVSS |
| 142- | beta1 | 1437 | EVQLVESGGGLVQAGGSLRLSCAASGRTISRFTMGWFRQAP |
| D8, A8, | | | GKERDFVAAISWGGGRTKYEDSVTGRFTISRDNAQNTVYLQ |
| H9 | | | MNSLKPEDTAVYYCAABSRGPYNSNWHQSSVSYDYWGQG |
| | | | TQVTVSS |
| 142-E10 | beta1 | 1438 | XVqLVESGGGLVQAGGSLRLSCAASGRTISRFTMGWERQAP |
| | | | GKERDFVAAISWGGGRTNYGDSVKGRSTISRDNAQNTVYLQ |
| | | | MNSLKPEDTAVYYCAABTRGPYNSNWAQSSVSYDYWGQG |
| | | | TQVTVSS |
| 142- | beta1 | 1439 | EVQLVESGGGLVQAGGSLRLSCAASGRTISRFTMGWFRQAP |
| E11, G11 | | | GKERDFVAAISWGGGRTNYEDSVKGRSTISRDNAQNTVYLQ |
| | | | MNSLKPEDTAVYYCAABTRGPYNSNWAQSSVSYDYWGQG |
| | | | TQVTVSS |
| 141-D11 | beta1 | 1440 | XVQLVESGGGLVQAGGSLRLSCAASGRTISRFTMGWFRQAP |
| | | | GKERDFVAAISWGGGRTNYEBSVKDRFTISRDNAQNTVYLQ |
| | | | MNSLKPEDTAVYYCAADSRGPYNSNWHQSSVSYDYWGQG |
| | | | TQVTVSS |
| 141- | beta1 | 1441 | EVQLVESGGGLVQAGGSLRLSCAASGRTISRFTMGWFRQAP |
| F11, 142- | | | GKERDFVAAISWGGGRTNYEDSVKDRFTISRDNAQNTVYLQ |
| B11 | | | MNSLKPEDTAVYYCAABSRGPYNSNWHQSSVSYDYWGQGT |
| | | | QVTVSS |
| 141-G11 | beta1 | 1442 | EV*LVESGGGLVQAGGSLRLSCAASGRTISRFTMGWFRQAP |
| | | | GKERDFVAAISWGGGRTKYEDSVTGRFTISRDNAQNTVYLQ |
| | | | MDSLKPEDTAVYYCAADSRGPYNSNWHQSSVSYDYWGQG |
| | | | TQVTVSS |
| 142-B7 | beta1 | 1443 | EV*LVESGGGLVQAGGSLRLSCAASGRTISRFTMGWFRQAP |
| | | | GKERDFVAAISWGGGRTKYEDSVTGRFTISRDNAQNTVYLQ |
| | | | MDSLKPEDTAVYYCAABSRGPYNSNWHQSSVSYDYWGQGT |
| | | | QVTVSS |
| 142-A7 | beta1 | 1444 | EVQLVESGGGLVQAGGSLSLSCAASGASGIIYSINAMGWYR |
| | | | QAPGKQREVVAVVTNGGSTEYADFVKGRFTVSREYAKNAV |
| | | | YLQMNSLKPEDTAVYYCYARGIIARWGSAPGNYWGQGTQV |
| | | | TVSS |
| 142-G7 | beta1 | 1445 | EVQLVESGGGLVQAGGSLRLSCAASGASGTIYSISSMGWYR |
| | | | QAPGKQREVVAVVTNGGSTEYADFVKGRFTVSREYAKNAV |
| | | | YLQMNSLKPEDTAVYYCYARGITARWGSAPGNYWGQGTQV |
| | | | TVSS |
| 141-H10 | beta1 | 1446 | EVQLVESGGGLVQPGGSLRLSCAVSGFTSDYYAIGWFRQAP |
| | | | GKEREGVSCISSSDGSTYYABSVKGRFTISRDNAKNTVYLQM |
| | | | NSLKPEDTAVYYCATTCVVNPEGYDFWGQGTQVTVSS |
| 141-E5 | beta1 | 1447 | EVQLVESGGGLVQAGGSLRLSCAASGSISSINSINIMGWYRQ |
| | | | APGKQRDLVAYITKRGSTKYADSVKGRFTISRDNAKNMATL |
| | | | QMNSLKPEDTAVYYCAAGPDGLGGQDDYWGQGTQVTVSS |
| 141-F5 | beta1 | 1448 | EVQLVESGGGLVQAGGSLRLACQASRAIERIVGWYRQAPGK |
| | | | QRELVAAITVPGITNYTDSVKDRFTISRDSAKNTVYLQMNKL |
| | | | KPEDTAVYYCAAPTYGRGQGTQVTVSS |
| 141-B6 | beta1 | 1449 | EVQLVESGGGMVQTGGSLRLSCAASGSTLNINNGEWYRQAP |
| | | | GKQREFVAAIGSGGTTDYADSVKGRFTISKANAKNTLYLQM |
| | | | NSLKPEDTAVYYCYVRSWRNYWGQGTQVTVSS |
| 245-D7 | beta1 | 1450 | EVQLVESGGGLVQAGGSLRLSCTASGRTASTYAMGWLRQA |
| | | | PGKEREFVAAISYSGATTYYADSVKGRFTISRDNAKSTAYLQ |
| | | | MNSLQPEDTAVYYCAASANRDLSLWVSTAYRSTGLVVYWG |
| | | | QGTQVTVSS |
| 242- | alpha5 | 1451 | EVQLVESGGGLVQAGGSLRLSCAASGGTFSTYAMGWFRQA |
| A4, A8, | | | PGEERQFVATITWTGYTYYTDSVKGRFT1SRDNAKKTVYLR |
| C12, C8, D7, | | | MDKLKPEDTAVYYCAADRRGYIETMSVNYDYWGQGTQVT |
| E12, F5, F8, | | | VSS |
| G7, E1l | | | |
| 241- | alpha5 | 1452 | EVQLVESGGGLVQPGGSLRLSCAASGSISIINFMNWYRQAPG |
| A10, A11, | | | KQRELVAQVTSGVTSGGTTYYDDSVKGRFTISRDNAKNMVS |
| B10, B11, | | | LQMNSLKPEDTAVYYCNVQGYFGSTWINYWGQGTQVTVSS |
| D10, D8, | | | |
| E10, E11, | | | |
| E4, F11, | | | |
| F8, G10, | | | |
| G11, H10, | | | |
| C11, xC8 | | | |
| 241-D11 | alpha5 | 1453 | EVQLVESGGGLVQPGGSLRLSCAAPGSISIINFMNWYRQAPG |
| | | | KQRELVAQVTSGVTSGGTTYYDDSVKGRFTISRDNAKNMVS |
| | | | LQMNSLKPEDTAVYYCNVQGYFGSTWINYWGQGTQVTVSS |
| 241- | alpha5 | 1454 | EVPLVESGGGLVQPGGSLRLSCAASGSISIINFMNWYRQAPG |
| C1, C2 | | | KQRELVAQVTSGVTSGGTTYYDDSVKGRFTISRDNAKNMVS |
| | | | LQMNSLKPEDTAVYYCNVQGYFGSTWINYWGQGTQVTVSS |
| 241-C10 | alpha5 | 1455 | EVRLVESGGGLVQPGGSLRLSCAASGSISIINFMNWYRQAPG |
| | | | KQRELVAQVTSGVTSGGTTYYDDSVKGRFTISRDNAKNMVS |
| | | | LQMNSLKPEDTAVYYCNVQGYFGSTWINYWGQGTQVTVSS |
| 241- | alpha5 | 1456 | EVQLVESGGGLVQPGGSLRLSCAASGFTFSRYTMTWVRQAP |
| E1, F10 | | | GKEPEWVSSITSRGSSTNYADSVKGRFTISRDNAKNTLYLQM |
| | | | NSLKPGDTAMYYCAKSGTETWYDRTYWGQGTQVTVSS |
| 241-E3 | alpha5 | 1457 | EVQLVESGGGLVQPGGSLRLSCAASGFTFSRYTMTWVRQAP |
| | | | GKEPEWVSSITSRGSSTNYADSAKGRFTISRDNAKNTLYLQM |
| | | | NSLKPGDTAMYYCAKSGTETWYDRTYWGQGTQVTVSS |
| 141-F1 | alpha3 | 1458 | EVQLVESGGGLVKAGGSLRLSCAASGSIFSINTMAWYRQAP |
| | | | GKQREWITSITSRGTTRYABSVKGRFTISTSNDKSTVYLQMN |
| | | | SLKPEDTAVYYCAADKDGVIGYSVGYWGQGTQVTVSS |
| 141-B4 | alpha3 | 1459 | EVQLVESGGGLVEAGGSLRLSCAASGSIFSINVMGWYRQAP |
| | | | GKQRELIGSITSRGTTRYTDSVKGRFTISRGNDKSTVYLQMN |
| | | | SLKPEDTAVYYCAABKGGVIGYSEGYWGQGTQVTVSS |
| 141- | alpha3 | 1460 | EVQLVESGGGLVEAGGSLRLSCAASGSIFSINVMGWYRQAP |
| F6, G1 | | | GKQRELIGSITSRGTTRYADSVKGRFTISRGNDMSTVYLQMN |
| | | | SLKPEDTAVYYCAABKGGVIGYSVGYWGQGTQVTVSS |
| 141-B11 | alpha3 | 1461 | EVQLVESGGGLVQAGGSLQLSCATSGESFSIKAMGWYRQAP |
| | | | GNQREMVATITGTGKTNYADSVKGRFTISRDIGTLYLQMNSL |
| | | | KPEDTAVYYCNLLSWPAGDYWGQGTQVTVSS |
| 141-H11 | alpha3 | 1462 | EVQLVESGGGLVQAGGSLRLSCTTSGRSFSIKAMGWYRQAP |
| | | | GNQRELVATITGTGSTTYADSAKGRFTISRXIGTLYLQMNSL |
| | | | KPEDTGVYYCNLLSWPAGDYWDQGTQVTVSS |
| 141-A5 | alpha3 | 1463 | EVQLVESGGALVQAGGSLRLSCAASGFAFSINTMAWYRQAP |
| | | | GNERDWVAIIFPGTGGSTVYEDSVKGRFTISRVNAKNTLYLQ |
| | | | MDSLRPEDTGVYYCARVRYIGGNYFPFDSWGQGTQVTVSS |
| 141-E6 | alpha3 | 1464 | EVQLVESGGALVQAGGSLRLSCAASGFXFSINTMAWYRQAP |
| | | | GKQRDWVAIIAPGTGGSTHYEDSVKGRFTISRVNAKNTLYL |
| | | | QMDSLRPEDTAVYYCARVRYTGGNYFPFDSWGQGTQVTVS |
| | | | S |
| 141-C2 | alpha3 | 1465 | XVQLVESGGGLVQPGGSLRLSCAASGFAFSNYPMGWVRQA |
| | | | PGKGLEWVSGISASSIRTSYADSVKGRFTISRDHAKNTLYLQ |
| | | | MNSLKVEDTAVYYCAQLRNYRYFGDMDYRGEGTLVTVSS |
| 245-G1 | alpha3 | 1466 | EVQLVESGGGLVQPGGSLRLSCAASGFAFSHYPMGWVRQAP |
| | | | GKGLEWVSGISASSIRTSYADSVKGRFTISRDHAKNTLYLQM |
| | | | NSLKVEDTAVYYCAQLRNYRYFGDMDYRGEGTLVTVSS |
| 141-D10 | alpha3 | 1467 | EVQLVESGGGLVQAGGSPRLSCVASGRTFSRCAMGWFRQAP |
| | | | GKEREEVAT1SANGELTYYANFVEGRFTISRDNAKNTVYLQM |
| | | | NSLKPEDTAVYFCAARRTFTRSSNRNEYADWGQGTQVTVSS |
| 141-A4 | alpha3 | 1468 | EVQLVESGGGLVQAGGSLTLSCAASGSVFSINAMGWYRQAP |
| | | | GKQRELVATITTRGTTNYVDAVKGRFTISKDNAKNTMYLQM |
| | | | NSLKPEDTAVYYCAABSPPYGMGSDLGYWGQGTQVTVSS |
| 141- | alpha3 | 1469 | EVQLVESGGGLVQAGGSLRLSCAASGRMFSPNVMGWFRQA |
| D4, 245- | | | PGDQREFVANIYSGGSTNYADTVKGRFTILSDNAKNTVYLQ |
| H1 | | | MTSLKPEDTGVYYCSVKRVGQSWFDSGYWGQGTQVTVSS |
| 141-B10 | alpha3 | 1470 | EVQLVESGGGLVQAGGSLNLSCAASGRILRINNMGWYRQAP |
| | | | GNKRDLVARITSGGSHRNYABSVKGRFTISIDNTRKTVYLQM |
| | | | NSLKPEDTAVYYCYGAIVSSRWGAEXTNDYWGQGTQVTVS |
| | | | S |
| 245-E7 | alpha3 | 1471 | EVQLVESGGGLVQAGGSLRLSCGASGSIGTFNIMGWYRQAP |
| | | | GKQREMVATMTSGGNTRYADSVKGRSTISRENAKKTITLQM |
| | | | NNLKPEDTGVYYCNLKTLTAWSTSTGDYWGQGTQVTVSS |
| 245-B1 | alpha3 | 1472 | EVQLVESGGGLVQAGGSLKLSCAASGFTFDDYAIGWFRQAP |
| | | | GKEREGVSCISSPDGSTYLVDSVKGRFTVSSDNAKNTAYLQ |
| | | | MNSLKPEDTAVYYCALRRGGSYYFCDPLTVYEYDYWGQGT |
| | | | QVTVSS |
| 245-D1 | alpha3 | 1473 | EVQLVESGGALVQPGGSLRLSCAASGFAFSNTVMSWARQAP |
| | | | GKGLEWVSTISASGVRTRYADSVTGRFTISRDYAKRTLYLQ |
| | | | MNSLSPEDTGVYYCVRRKSYTDYDPPRWDYDTWGQGTQVT |
| | | | VSS |
| 245- | alpha3 | 1474 | EVQLVESGGGLVQAGGSLRLSCAASGGTFRYQNMGWYRQA |
| A1, F1 | | | PGNEREWVASNWATGATAYADSVKGRFTISRDDAKNVVYL |
| | | | QMNNLKPEDTAVYYCNRLSRPWSWGQGTQVTVSS |
| 245-E1 | alpha3 | 1475 | EVQLVESGGGLVQAGGSLRLSCTVSITTYSFKRVAWHRQAP |
| | | | GNERELVAAIWNTDNTDYADSVKGRFTISRDNAKKTVYLQ |
| | | | MNRLKPEDTAVYYCSANRGSYGTYWGQGTQVTVSS |
| 245-F7 | alpha3 | 1476 | EVQLVDSGGRLVQPGDLLRLSCTTSGFASSGYVLGWFRQAP |
| | | | GKEREFVAAIIRSGGNTAYSDSVKGRFTISRDNAKNTVYLQM |
| | | | KSLKPEDTGIYYCARSSVLGRSPALYDLWGQGTQVTVSS |
| 248-A8 | not yet | 1477 | EVQLVESRGGLVQAGGSLRLSCTASERTFSRNVMAWFRQAP |
| | done | | GKEREFVAAIRWSGGTTSYADFVKGRFTMSRDNAKNTIYLE |
| | | | MNSLKPEDTAVYYCAADARLYSPLPRRSSAYDYWGQGTQV |
| | | | TVSS |
| 248-H8 | not yet | 1478 | EVQLVESGGGLVQPGGSLRLSCAASGFTFDDYDIGWFRQTP |
| | done | | GKEREGVSCISSSDGYKFYADSVKDRFTISSDNAKNTVYLQM |
| | | | NS LKPEDTAVYYCAAVKRAPKQYCSDYEAYDYWGQETQVT |
| | | | VSS |
| 248-A2 | not yet | 1479 | EVQLVESGGGLVQAGGSLRLSCAASGSISSLGLVQWHRQVS |
| | done | | RKQRGLVAQLNSGGTTTYADSVKGRFTISRDNAKSTVYLQM |
| | | | HSLKPEDTAVYYCFLRVIVPGGFRDYWGQGTQVTVSS |
| 248-B2 | not yet | 1480 | EVQLVESGGGLVQAGGSLRLSCVASGBTICIRAMDWYRQAP |
| | done | | GKERELVATITSDGSTYYADSVKGRFTISRDNAKNTLYLQM |
| | | | NSLKPEDTAAYYCKAPPYGSSCPLVWGQGTQVTVSS |
| 152-D2 | unknown | 1481 | EVQLVESGGGLVQAGGSLTLSCAASGNISSINIVNWYHQAPG |
| | | | KQRELVAFITNGEETNYAETVKGRFTVSRDNAKNTVSLQMN |
| | | | SLKPEDTGVYYCNLHIMWPTVRDYWGQGTQVTVSS |
| 152-E9 | unknown | 1482 | EVQLVESGGGLVQPGGSLRLSCAASGITLNYYAIGWFRQAPG |
| | | | KEREGVSCISSSAGSAYYADSVKGRFTISRDNAKNTLYLQMN |
| | | | SLKPEDTAVYYCAAQTAGTSIGCHISIGWYDYWGQGTQVTV |
| | | | SS |
| 152-E10 | unknown | 1483 | EVQLVESGGGLVQAGGSLRLSCAASGFTFDDYAIGWFRQAP |
| | | | GKEREGVSCISSSDGSIFYADSVKGRFTISSDNAKNTVYLQM |
| | | | NSLKPEDTAVYYCAAALRTVLAGTPTCDRYEYDYWGQGTQ |
| | | | VTVSS |
| 152-D7 | unknown | 1484 | EVQLVESGGGLVQAGGSLTLSCAASGNISSINIVNWYHQAPG |
| | | | KQRELVAFITNGEETNYAETVKGRFTVSRDNAKNTVSLQMN |
| | | | SLKPEDTGVYYCNLHIMWPTVRDYWGQGTQVTVSS |
| VHH-H6 | Alpha | 1485 | QVQLQDSGGGLVQAGGSLRLSCEASGRTFSSYAMGWFRQPP |
| | 3 | | GKEREWVSTISRSGSA1YAYPVKGRFTMSRDNAKNTVYLEM |
| | | | NSLKPEDTAVFYCAAARSGVPSSRPTDYDYWGQGTQVTVSS |
| VHH-5 | Alpha | 1486 | EVQLVESGGGLVQAGGSLRLSCAASGGTFRYQNMGWYRQA |
| bihead | 3 | | PGNEREVVVASNWATGATAYADSVKGRFTISRDDAKNVVYL |
| (GS15) | | | QMNNLKPEDTAVYYCNRLSRPWGWGQGTQVTVSSGGGGS |
| | | | GGGGSGGGGSEVQLVESGGGLVQAGGSLRLSCAASGGTFRY |
| | | | QNMGWYRQAPGNEREWVASNWATGATAYADSVKGRFTIS |
| | | | RDDAKNVVYLQMNNLKPEDTAVYYCNRLSRPWSWGQGTQ |
| | | | VTVSS |
| VHH-5 | Alpha | 1487 | EVQLVESGGGLVQAGGSLRLSCAASGGTFRYQNMGWYRQA |
| bihead | 3 | | PGNEREWVASNWATGATAYADSVKGRFTISRDDAKNVVYL |
| (GS5) | | | QMNNLKPEDTAVYYCNRLSRPWGWGQGTQVTVSSGGGGSE |
| | | | VQLVESGGGLVQAGGSLRLSCAASGGTFRYQNMGWYRQAP |
| | | | GNEREWVASNWATGATAYADSVKGRFTISRDDAKNVVYLQ |
| | | | MNNLKPEDTAVYYCNRLSRPWSWGQGTQVTVSS |

[0077] In particular, the invention in some specific aspects provides:
[0078] amino acid sequences that are directed against (as defined herein) Integrins and that have at least 80%, preferably at least 85%, such as 90% or 95% or more sequence identity with at least one of the amino acid sequences of SEQ ID NO□ 1316 to 1476, and SEQ ID NO: 1485, 1486, and 1487 (see Table 1). These amino acid sequences may further be such that they neutralize binding of the cognate ligand to Integrins; and/or compete with the cognate ligand for binding to Integrins; and/or are directed against an interaction site (as defined herein) on Integrins (such as the ligand binding site);
[0079] amino acid sequences that cross-block (as defined herein) the binding of at least one of the amino acid sequences of SEQ ID NO□ 1316 to 1476, and SEQ ID NO: 1485, 1486, and 1487 (see Table 1) to Integrins and/or that compete with at least one of the amino acid sequences of SEQ ID NO□ 1316 to 1476, and SEQ ID NO: 1485, 1486, and 1487 (see Table 1) for binding to Integrins. Again, these amino acid sequences may further be such that they neutralize binding of the cognate ligand to Integrins; and/or compete with the cognate ligand for binding to Integrins; and/or are directed against an interaction site (as defined herein) on Integrins (such as the ligand binding site);
   which amino acid sequences may be as further described herein (and may for example be Nanobodies); as well as polypeptides of the invention that comprise one or more of such amino acid sequences (which may be as further described herein, and may for example be bispecific and/or biparatopic polypeptides as described herein), and nucleic acid sequences that encode such amino acid sequences and polypeptides. Such amino acid sequences and polypeptides do not include any naturally occurring ligands.

[0080] Accordingly, some particularly preferred Nanobodies of the invention are Nanobodies which can bind (as further defined herein) to and/or are directed against to Integrins and which:
[0081] i) have at least 80% amino acid identity with at least one of the amino acid sequences of SEQ ID NO□s: 1316 to 1476, and SEQ ID NO: 1485, 1486, and 1487 (see Table 1), in which for the purposes of determining the degree of amino acid identity, the amino acid residues that form the CDR sequences are disregarded. In this respect, reference is also made to Table A-1, which lists the framework 1 sequences (SEQ ID NO□s: 1205, 2 framework 2 sequences (SEQ ID NO□s: 466 to 635), framework 3 sequences (SEQ ID NO□s: 806 to 975) and framework 4 sequences (SEQ ID NO□s: 1146 to 1315) of the Nanobodies of SEQ ID NO□s: 1316 to 1476, 1485, 1486, 1487 (see Table 1) (with respect to the amino acid residues at positions 1 to 4 and 27 to 30 of the framework 1 sequences, reference is also made to the comments made below. Thus, for determining the degree of amino acid identity, these residues are preferably disregarded);
   and in which:
[0082] ii) preferably one or more of the amino acid residues at positions 11, 37, 44, 45, 47, 83, 84, 103, 104 and 108 according to the Kabat numbering are chosen from the Hallmark residues mentioned in Table A-3 below.

[0083] In these Nanobodies, the CDR sequences are generally as further defined herein.

[0084] Again, such Nanobodies may be derived in any suitable manner and from any suitable source, and may for example be naturally occurring V_{HH} sequences (i.e. from a suitable species of Camelid) or synthetic or semi-synthetic amino acid sequences, including but not limited to □humanized□ (as defined herein) Nanobodies, □camelized□ (as defined herein immunoglobulin sequences (and in particular camelized heavy chain variable domain sequences), as well as Nanobodies that have been obtained by techniques such as affinity maturation (for example, starting from synthetic, random or naturally occurring immunoglobulin sequences), CDR grafting, veneering, combining fragments derived from different immunoglobulin sequences, PCR assembly using overlapping primers, and similar techniques for engineering immunoglobulin sequences well known to the skilled person; or any suitable combination of any of the foregoing as further described herein. Also, when a Nanobody comprises a V_{HH} sequence, said Nanobody may be suitably humanized, as further described herein, so as to provide one or more further (partially or fully) humanized Nanobodies of the invention. Similarly, when a Nanobody comprises a synthetic or semi-synthetic sequence (such as a partially humanized sequence), said Nanobody may optionally be further suitably humanized, again as described herein, again so as to provide one or more further (partially or fully) humanized Nanobodies of the invention.

[0085] In particular, humanized Nanobodies may be amino acid sequences that are as generally defined for Nanobodies in the previous paragraphs, but in which at least one amino acid residue is present (and in particular, in at least one of the framework residues) that is and/or that corresponds to a humanizing substitution (as defined herein). Some preferred, but non-limiting humanizing substitutions (and suitable combinations thereof) will become clear to the skilled person based on the disclosure herein. In addition, or alternatively, other potentially useful humanizing substitutions can be ascertained by comparing the sequence of the framework regions of a naturally occurring V_{HH} sequence with the corresponding framework sequence of one or more closely related human V_{H} sequences, after which one or more of the potentially useful humanizing substitutions (or combinations thereof) thus determined can be introduced into said V_{HH} sequence (in any manner known per se, as further described herein) and the resulting humanized V_{HH} sequences can be tested for affinity for the target, for stability, for ease and level of expression, and/or for other desired properties. In this way, by means of a limited degree of trial and error, other suitable humanizing substitutions (or suitable combinations thereof) can be determined by the skilled person based on the disclosure herein. Also, based on the foregoing, (the framework regions of) a Nanobody may be partially humanized or fully humanized.

[0086] Thus, some other preferred Nanobodies of the invention are Nanobodies which can bind (as further defined herein) to Integrins and which:
[0087] i) are a humanized variant of one of the amino acid sequences of SEQ ID NO□s: 1316 to 1476, and SEQ ID NO: 1485, 1486, and 1487 (see Table 1); and/or
[0088] ii) have at least 80% amino acid identity with at least one of the amino acid sequences of SEQ ID NO□s: 1316 to 1476, and SEQ ID NO: 1485, 1486, and 1487 (see Table 1), in which for the purposes of determining the degree of amino acid identity, the amino acid residues that form the CDR sequences are disregarded;
   and in which:
[0089] i) preferably one or more of the amino acid residues at positions 11, 37, 44, 45, 47, 83, 84, 103, 104 and 108 according to the Kabat numbering are chosen from the Hallmark residues mentioned in Table A-3 below.

[0090] According to another specific aspect of the invention, the invention provides a number of stretches of amino acid residues (i.e. small peptides) that are particularly suited for binding to Integrins. These stretches of amino acid residues may be present in, and/or may be corporated into, an amino acid sequence of the invention, in particular in such a way that they form (part of) the antigen binding site of an amino acid sequence of the invention. As these stretches of amino acid residues were first generated as CDR sequences of heavy chain antibodies or V_{HH} sequences that were raised against Integrins (or may be based on and/or derived from such CDR sequences, as further described herein), they will also generally be referred to herein as □CDR sequences□ (i.e. as CDR1 sequences, CDR2 sequences and CDR3 sequences, respectively). It should however be noted that the invention in its broadest sense is not limited to a specific structural role or function that these stretches of amino acid residues may have in an amino acid sequence of the invention, as long as these stretches of amino acid residues allow the amino acid sequence of the invention to bind to Integrins. Thus, generally, the invention in its broadest sense comprises any amino acid sequence that is capable of binding to Integrins and that comprises one or more CDR sequences as described herein, and in particular a suitable combination of two or more such CDR sequences, that are suitably linked to each other via one or more further amino acid sequences, such that the entire amino acid sequence forms a binding domain and/or binding unit that is capable of binding to Integrins. It should however also be noted that the presence of only one such CDR sequence in an amino acid sequence of the invention may by itself already be sufficient to provide an amino acid sequence of the invention that is capable of binding to Integrins; reference is for example again made to the so-called□Expedite fragments□ described in WO 03/050531.

[0091] Thus, in another specific, but non-limiting aspect, the amino acid sequence of the invention may be an amino acid sequence that comprises at least one amino acid sequence that is chosen from the group consisting of the CDR1 sequences, CDR2 sequences and CDR3 sequences that are described herein (or any suitable combination thereof). In particular, an amino acid sequence of the invention may be an amino acid sequence that comprises at least one antigen binding site, wherein said antigen binding site comprises at least one amino acid sequence that is chosen from the group consisting of the CDR1 sequences, CDR2 sequences and CDR3 sequences that are described herein (or any suitable combination thereof).

[0092] Generally, in this aspect of the invention, the amino acid sequence of the invention may be any amino acid sequence that comprises at least one stretch of amino acid residues, in which said stretch of amino acid residues has an amino acid sequence that corresponds to the sequence of at least one of the CDR sequences described herein. Such an amino acid sequence may or may not comprise an immunoglobulin fold. For example, and without limitation, such an amino acid sequence may be a suitable fragment of an immunoglobulin sequence that comprises at least one such CDR sequence, but that is not large enough to form a (complete) immunoglobulin fold (reference is for example again made to the □Expedite fragments□ described in WO 03/050531). Alternatively, such an amino acid sequence may be a suitable□ protein scaffold□ that comprises least one stretch of amino acid residues that corresponds to such a CDR sequence (i.e. as part of its antigen binding site). Suitable scaffolds for presenting amino acid sequences will be clear to the skilled person, and for example comprise, without limitation, to binding scaffolds based on or derived from immunoglobulins (i.e. other than the immunoglobulin sequences already described herein), protein scaffolds derived from protein A domains (such as Affibodies™), tendamistat, fibronectin, lipocalin, CTLA-4, T-cell receptors, designed ankyrin repeats, avimers and PDZ domains (Binz et al., Nat. Biotech 2005, Vol 23:1257), and binding moieties based on DNA or RNA including but not limited to DNA or RNA aptamers (Ulrich et al., Comb Chem High Throughput Screen 2006 9(8):619-32).

[0093] Again, any amino acid sequence of the invention that comprises one or more of these CDR sequences is preferably such that it can specifically bind (as defined herein) to Integrins, and more in particular such that it can bind to Integrins with an affinity (suitably measured and/or expressed as a K_{D}-value (actual or apparent), a K_{A}-value (actual or apparent), a kₒₙ-rate and/or a k_{off}-rate, or alternatively as an IC₅₀ value, as further described herein), that is as defined herein.

[0094] More in particular, the amino acid sequences according to this aspect of the invention may be any amino acid sequence that comprises at least one antigen binding site, wherein said antigen binding site comprises at least two amino acid sequences that are chosen from the group consisting of the CDR1 sequences described herein, the CDR2 sequences described herein and the CDR3 sequences described herein, such that (i) when the first amino acid sequence is chosen from the CDR1 sequences described herein, the second amino acid sequence is chosen from the CDR2 sequences described herein or the CDR3 sequences described herein; (ii) when the first amino acid sequence is chosen from the CDR2 sequences described herein, the second amino acid sequence is chosen from the CDR1 sequences described herein or the CDR3 sequences described herein; or (iii) when the first amino acid sequence is chosen from the CDR3 sequences described herein, the second amino acid sequence is chosen from the CDR1 sequences described herein or the CDR3 sequences described herein.

[0095] Even more in particular, the amino acid sequences of the invention may be amino acid sequences that comprise at least one antigen binding site, wherein said antigen binding site comprises at least three amino acid sequences that are chosen from the group consisting of the CDR1 sequences described herein, the CDR2 sequences described herein and the CDR3 sequences described herein, such that the first amino acid sequence is chosen from the CDR1 sequences described herein, the second amino acid sequence is chosen from the CDR2 sequences described herein, and the third amino acid sequence is chosen from the CDR3 sequences described herein. Preferred combinations of CDR1, CDR2 and CDR3 sequences will become clear from the further description herein. As will be clear to the skilled person, such an amino acid sequence is preferably an immunoglobulin sequence (as further described herein), but it may for example also be any other amino acid sequence that comprises a suitable scaffold for presenting said CDR sequences.

[0096] Thus, in one specific, but non-limiting aspect, the invention relates to an amino acid sequence directed against Integrins, that comprises one or more stretches of amino acid residues chosen from the group consisting of:
[0097] a) the amino acid sequences of SEQ ID NO□s: 296 to 465;
[0098] b) amino acid sequences that have at least 80% amino acid identity with at least one of the amino acid sequences of SEQ ID NO□s: 296 to 465;
[0099] c) amino acid sequences that have 3, 2, or 1 amino acid difference with at least one of the amino acid sequences of SEQ ID NO□ 296s to 465;
[0100] d) the amino acid sequences of SEQ ID NO□s: 636 to 805;
[0101] e) amino acid sequences that have at least 80% amino acid identity with at least one of the amino acid sequences of SEQ ID NO□s: 636 to 805;
[0102] f) amino acid sequences that have 3, 2, or 1 amino acid difference with at least one of the amino acid sequences of SEQ ID NO□s: 636 to 805;
[0103] g) the amino acid sequences of SEQ ID NO□s: 976 to 1145;
[0104] h) amino acid sequences that have at least 80% amino acid identity with at least one of the amino acid sequences of SEQ ID NO□s: 976 to 1145;
[0105] i) amino acid sequences that have 3, 2, or 1 amino acid difference with at least one of the amino acid sequences of SEQ ID NO□s: 976 to 1145;
   or any suitable combination thereof.

[0106] When an amino acid sequence of the invention contains one or more amino acid sequences according to b) and/or c):
[0107] i) any amino acid substitution in such an amino acid sequence according to b) and/or c) is preferably, and compared to the corresponding amino acid sequence according to a), a conservative amino acid substitution, (as defined herein);
   and/or
[0108] ii) the amino acid sequence according to b) and/or c) preferably only contains amino acid substitutions, and no amino acid deletions or insertions, compared to the corresponding amino acid sequence according to a);
   and/or
[0109] iii) the amino acid sequence according to b) and/or c) may be an amino acid sequence that is derived from an amino acid sequence according to a) by means of affinity maturation using one or more techniques of affinity maturation known per se.

[0110] Similarly, when an amino acid sequence of the invention contains one or more amino acid sequences according to e) and/or f):
[0111] i) any amino acid substitution in such an amino acid sequence according to e) and/or f) is preferably, and compared to the corresponding amino acid sequence according to d), a conservative amino acid substitution, (as defined herein);
   and/or
[0112] ii) the amino acid sequence according to e) and/or f) preferably only contains amino acid substitutions, and no amino acid deletions or insertions, compared to the corresponding amino acid sequence according to d);
   and/or
[0113] iii) the amino acid sequence according to e) and/or f) may be an amino acid sequence that is derived from an amino acid sequence according to d) by means of affinity maturation using one or more techniques of affinity maturation known per se.

[0114] Also, similarly, when an amino acid sequence of the invention contains one or more amino acid sequences according to h) and/or i):
[0115] i) any amino acid substitution in such an amino acid sequence according to h) and/or i) is preferably, and compared to the corresponding amino acid sequence according to g), a conservative amino acid substitution, (as defined herein);
   and/or
[0116] ii) the amino acid sequence according to h) and/or i) preferably only contains amino acid substitutions, and no amino acid deletions or insertions, compared to the corresponding amino acid sequence according to g);
   and/or
[0117] iii) the amino acid sequence according to h) and/or i) may be an amino acid sequence that is derived from an amino acid sequence according to g) by means of affinity maturation using one or more techniques of affinity maturation known per se.

[0118] It should be understood that the last preceding paragraphs also generally apply to any amino acid sequences of the invention that comprise one or more amino acid sequences according to b), c), e), f), h) or i), respectively.

[0119] In this specific aspect, the amino acid sequence preferably comprises one or more stretches of amino acid residues chosen from the group consisting of:

i) the amino acid sequences of SEQ ID NO□ 296s to 465;
ii) the amino acid sequences of SEQ ID NO□s: 636 to 805; and
iii) the amino acid sequences of SEQ ID NO□s: 976 to 1145;
or any suitable combination thereof.

[0120] Also, preferably, in such an amino acid sequence, at least one of said stretches of amino acid residues forms part of the antigen binding site for binding against integrins.

[0121] In a more specific, but again non-limiting aspect, the invention relates to an amino acid sequence directed against Integrins, that comprises two or more stretches of amino acid residues chosen from the group consisting of:
[0122] a) the amino acid sequences of SEQ ID NO□s: 296 to 465;
[0123] b) amino acid sequences that have at least 80% amino acid identity with at least one of the amino acid sequences of SEQ ID NO□s: 296 to 465;
[0124] c) amino acid sequences that have 3, 2, or 1 amino acid difference with at least one of the amino acid sequences of SEQ ID NO□s: 296 to 465;
[0125] d) the amino acid sequences of SEQ ID NO□s: 636 to 805;
[0126] e) amino acid sequences that have at least 80% amino acid identity with at least one of the amino acid sequences of SEQ ID NO□s: 636 to 805;
[0127] f) amino acid sequences that have 3, 2, or 1 amino acid difference with at least one of the amino acid sequences of SEQ ID NO□s: 636 to 805;
[0128] g) the amino acid sequences of SEQ ID NO□s: 976 to 1145;
[0129] h) amino acid sequences that have at least 80% amino acid identity with at least one of the amino acid sequences of SEQ ID NO□s: 976 to 1145;
[0130] i) amino acid sequences that have 3, 2, or 1 amino acid difference with at least one of the amino acid sequences of SEQ ID NO□ 976s to 1145;
   such that (i) when the first stretch of amino acid residues corresponds to one of the amino acid sequences according to a), b) or c), the second stretch of amino acid residues corresponds to one of the amino acid sequences according to d), e), f), g), h) or i); (ii) when the first stretch of amino acid residues corresponds to one of the amino acid sequences according to d), e) or f), the second stretch of amino acid residues corresponds to one of the amino acid sequences according to a), b), c), g), h) or i); or (iii) when the first stretch of amino acid residues corresponds to one of the amino acid sequences according to g), h) or i), the second stretch of amino acid residues corresponds to one of the amino acid sequences according to a), b), c), d), e) or f).

[0131] In this specific aspect, the amino acid sequence preferably comprises two or more stretches of amino acid residues chosen from the group consisting of:

i) the amino acid sequences of SEQ ID NO□s: 296 to 465;
ii) the amino acid sequences of SEQ ID NO□s: 636 to 805; and
iii) the amino acid sequences of SEQ ID NO□s: 976 to 1145;
such that, (i) when the first stretch of amino acid residues corresponds to one of the amino acid sequences of SEQ ID NO□s: 296 to 165 the second stretch of amino acid residues corresponds to one of the amino acid sequences of SEQ ID NO□s: 636 to 805 or of SEQ ID NOD s: 976 to; [symbol] [symbol] when the first stretch of amino acid residues corresponds to one of the amino acid sequences of SEQ ID NO□s: 636 to 805 [symbol] [symbol] second stretch of amino acid residues corresponds to one of the amino acid sequences of SEQ ID NO□s: 296 to 465 or of SEQ ID NOD s: 976 to; [symbol] [symbol] (5ii) when the first stretch of amino acid residues corresponds to one of the amino acid sequences of SEQ ID NO□s: 976 to, [symbol] [symbol] second stretch of amino acid residues corresponds to one of the amino acid sequences of SEQ ID NO□s: 296 to 465 or of SEQ ID NO□s: 636 to 805

[0132] Also, in such an amino acid sequence, the at least two stretches of amino acid residues again preferably form part of the antigen binding site for binding against integrins.

[0133] In an even more specific, but non-limiting aspect, the invention relates to an amino acid sequence directed against Integrins, that comprises three or more stretches of amino acid residues, in which the first stretch of amino acid residues is chosen from the group consisting of:
[0134] a) the amino acid sequences of SEQ ID NO□s: 296 to 465;
[0135] b) amino acid sequences that have at least 80% amino acid identity with at least one of the amino acid sequences of SEQ ID NO□s: 296 to 465;
[0136] c) amino acid sequences that have 3, 2, or 1 amino acid difference with at least one of the amino acid sequences of SEQ ID NO□s: 296 to 465;
   the second stretch of amino acid residues is chosen from the group consisting of:
[0137] d) the amino acid sequences of SEQ ID NO□s: 636 to 805;
[0138] e) amino acid sequences that have at least 80% amino acid identity with at least one of the amino acid sequences of SEQ ID NO□s: 636 to 805;
[0139] f) amino acid sequences that have 3, 2, or 1 amino acid difference with at least one of the amino acid sequences of SEQ ID NO□s: 636 to 805;
   and the third stretch of amino acid residues is chosen from the group consisting of:
[0140] g) the amino acid sequences of SEQ ID NO□s: 976 to 1145;
[0141] h) amino acid sequences that have at least 80% amino acid identity with at least one of the amino acid sequences of SEQ ID NO□s: 976 to 1145;
[0142] i) amino acid sequences that have 3, 2, or 1 amino acid difference with at least one of the amino acid sequences of SEQ ID NO□s: 976 to 1145.

[0143] Preferably, in this specific aspect, the first stretch of amino acid residues is chosen from the group consisting of the amino acid sequences of SEQ ID NO□s: 296 to 465; the second stretch of amino acid residues is chosen from the group consisting of the amino acid sequences of SEQ ID NO□s: 636 to 805; and the third stretch of amino acid residues is chosen from the group consisting of the amino acid sequences of SEQ ID NO□s: 976 to 1145.

[0144] Again, preferably, in such an amino acid sequence, the at least three stretches of amino acid residues forms part of the antigen binding site for binding against Integrins.

[0145] Preferred combinations of such stretches of amino acid sequences will become clear from the further disclosure herein.

[0146] Preferably, in such amino acid sequences the CDR sequences have at least 70% amino acid identity, preferably at least 80% amino acid identity, more preferably at least 90% amino acid identity, such as 95% amino acid identity or more or even essentially 100% amino acid identity with the CDR sequences of at least one of the amino acid sequences of SEQ ID NO□131s6 to 1476, and SEQ ID NO: 1485, 1486, and 1487 (see Table 1). This degree of amino acid identity can for example be determined by determining the degree of amino acid identity (in a manner described herein) between said amino acid sequence and one or more of the sequences of SEQ ID NO□131s6 to 1476, and SEQ ID NO: 1485, 1486, and 1487 (see Table 1), in which the amino acid residues that form the framework regions are disregarded. Also, such amino acid sequences of the invention can be as further described herein.

[0147] Also, such amino acid sequences are preferably such that they can specifically bind (as defined herein) to Integrins; and more in particular bind to Integrins with an affinity (suitably measured and/or expressed as a K_{D}-value (actual or apparent), a K_{A}-value (actual or apparent), a kₒₙ-rate and/or a k_{off}-rate, or alternatively as an IC₅₀ value, as further described herein) that is as defined herein.

[0148] When the amino acid sequence of the invention essentially consists of 4 framework regions (FR1 to FR4, respectively) and 3 complementarity determining regions (CDR1 to CDR3, respectively), the amino acid sequence of the invention is preferably such that:
[0149] CDR1 is chosen from the group consisting of:
[0150] a) the amino acid sequences of SEQ ID NO□s: 296 to 465;
[0151] b) amino acid sequences that have at least 80% amino acid identity with at least one of the amino acid sequences of SEQ ID NO□s: 296 to 465;
[0152] c) amino acid sequences that have 3, 2, or 1 amino acid difference with at least one of the amino acid sequences of SEQ ID NO□s: 296 to 465;
   and/or
   [0153] CDR2 is chosen from the group consisting of:
[0154] d) the amino acid sequences of SEQ ID NO□s: 636 to 805;
[0155] e) amino acid sequences that have at least 80% amino acid identity with at least one of the amino acid sequences of SEQ ID NO□s: 636 to 805;
[0156] f) amino acid sequences that have 3, 2, or 1 amino acid difference with at least one of the amino acid sequences of SEQ ID NO□s: 636 to 805;
   and/or
   [0157] CDR3 is chosen from the group consisting of:
[0158] g) the amino acid sequences of SEQ ID NO□s: 976 to 1145;
[0159] h) amino acid sequences that have at least 80% amino acid identity with at least one of the amino acid sequences of SEQ ID NO□s: 976 to 1145;
[0160] i) amino acid sequences that have 3, 2, or 1 amino acid difference with at least one of the amino acid sequences of SEQ ID NO□s: 976 to 1145.

[0161] In particular, such an amino acid sequence of the invention may be such that CDR1 is chosen from the group consisting of the amino acid sequences of SEQ ID NO□s: 296 to 465; and/or CDR2 is chosen from the group consisting of the amino acid sequences of SEQ ID NO□s: 636 to 805; and/or CDR3 is chosen from the group consisting of the amino acid sequences of SEQ ID NO□s: 976 to 1145.

[0162] In particular, when the amino acid sequence of the invention essentially consists of 4 framework regions (FR1 to FR4, respectively) and 3 complementarity determining regions (CDR1 to CDR3, respectively), the amino acid sequence of the invention is preferably such that:

[0163] CDR1 is chosen from the group consisting of:
[0164] a) the amino acid sequences of SEQ ID NO□s: 296 to 465;
[0165] b) amino acid sequences that have at least 80% amino acid identity with at least one of the amino acid sequences of SEQ ID NO□s: 296 to 465;
[0166] c) amino acid sequences that have 3, 2, or 1 amino acid difference with at least one of the amino acid sequences of SEQ ID NO□s: 296 to 465;
   and

[0167] CDR2 is chosen from the group consisting of:
[0168] d) the amino acid sequences of SEQ ID NO□s: 636 to 805;
[0169] e) amino acid sequences that have at least 80% amino acid identity with at least one of the amino acid sequences of SEQ ID NO□s: 636 to 805;
[0170] f) amino acid sequences that have 3, 2, or 1 amino acid difference with at least one of the amino acid sequences of SEQ ID NO□s: 636 to 805;
   and

[0171] CDR3 is chosen from the group consisting of:
[0172] g) the amino acid sequences of SEQ ID NO□s: 976 to 1145;
[0173] h) amino acid sequences that have at least 80% amino acid identity with at least one of the amino acid sequences of SEQ ID NO□s: 976 to 1145;
[0174] i) amino acid sequences that have 3, 2, or 1 amino acid difference with at least one of the amino acid sequences of SEQ ID NO□s: 976 to 1145; or any suitable fragment of such an amino acid sequence

[0175] In particular, such an amino acid sequence of the invention may be such that CDR1 is chosen from the group consisting of the amino acid sequences of SEQ ID NO□s: 296 to 465; and CDR2 is chosen from the group consisting of the amino acid sequences of SEQ ID NO□s: 636 to 805; and CDR3 is chosen from the group consisting of the amino acid sequences of SEQ ID NO□s: 976 to 1145.

[0176] Again, preferred combinations of CDR sequences will become clear from the further description herein.

[0177] Also, such amino acid sequences are preferably such that they can specifically bind (as defined herein) to Integrins; and more in particular bind to Integrins with an affinity (suitably measured and/or expressed as a K_{D}-value (actual or apparent), a K_{A}-value (actual or apparent), a kₒₙ-rate and/or a k_{off}-rate, or alternatively as an IC₅₀ value, as further described herein) that is as defined herein.

[0178] In one preferred, but non-limiting aspect, the invention relates to an amino acid sequence that essentially consists of 4 framework regions (FR1 to FR4, respectively) and 3 complementarity determining regions (CDR1 to CDR3, respectively), in which the CDR sequences of said amino acid sequence have at least 70% amino acid identity, preferably at least 80% amino acid identity, more preferably at least 90% amino acid identity, such as 95% amino acid identity or more or even essentially 100% amino acid identity with the CDR sequences of at least one of the amino acid sequences of SEQ ID NO□131s6 to 1476, and SEQ ID NO: 1485, 1486, and 1487 (see Table 1). This degree of amino acid identity can for example be determined by determining the degree of amino acid identity (in a mariner described herein) between said amino acid sequence and one or more of the sequences of SEQ ID NO□131s6 to 1476, and SEQ ID NO: 1485, 1486, and 1487 (see Table 1), in which the amino acid residues that form the framework regions are disregarded. Such amino acid sequences of the invention can be as further described herein.

[0179] In such an amino acid sequence of the invention, the framework sequences may be any suitable framework sequences, and examples of suitable framework sequences will be clear to the skilled person, for example on the basis the standard handbooks and the further disclosure and prior art mentioned herein.

[0180] The framework sequences are preferably (a suitable combination of) immunoglobulin framework sequences or framework sequences that have been derived from immunoglobulin framework sequences (for example, by humanization or camelization). For example, the framework sequences may be framework sequences derived from a light chain variable domain (e.g. a V_{L}-sequence) and/or from a heavy chain variable domain (e.g. a V_{H}-sequence). In one particularly preferred aspect, the framework sequences are either framework sequences that have been derived from a V_{HH}-sequence (in which said framework sequences may optionally have been partially or fully humanized) or are conventional V_{H} sequences that have been camelized (as defined herein).

[0181] The framework sequences are preferably such that the amino acid sequence of the invention is a domain antibody (or an amino acid sequence that is suitable for use as a domain antibody); is a single domain antibody (or an amino acid sequence that is suitable for use as a single domain antibody); is a “dAb” (or an amino acid sequence that is suitable for use as a dAb); or is a Nanobody™ (including but not limited to V_{HH} sequence). Again, suitable framework sequences will be clear to the skilled person, for example on the basis the standard handbooks and the further disclosure and prior art mentioned herein.

[0182] In particular, the framework, sequences present in the amino acid sequences of the invention may contain one or more of Hallmark residues (as defined herein), such that the amino acid sequence of the invention is a Nanobody™. Some preferred, but non-limiting examples of (suitable combinations of) such framework sequences will become clear from the further disclosure herein.

[0183] Again, as generally described herein for the amino acid sequences of the invention, it is also possible to use suitable fragments (or combinations of fragments) of any of the foregoing, such as fragments that contain one or more CDR sequences, suitably flanked by and/or linked via one or more framework sequences (for example, in the same order as these CDR□s and framework sequences may occur in th [symbol] [symbol] immunoglobulin sequence from which the fragment has been derived). Such fragments may also again be such that they comprise or can form an immunoglobulin fold, or alternatively be such that they do not comprise or cannot form an immunoglobulin fold.

[0184] In one specific aspect, such a fragment comprises a single CDR sequence as described herein (and in particular a CDR3 sequence), that is flanked on each side by (part of) a framework sequence (and in particular, part of the framework sequence(s) that, in the immunoglobulin sequence from which the fragment is derived, are adjacent to said CDR sequence. For example, a CDR3 sequence may be preceded by (part of) a FR3 sequence and followed by (part of) a FR4 sequence). Such a fragment may also contain a disulphide bridge, and in particular a disulphide bridge that links the two framework regions that precede and follow the CDR sequence, respectively (for the purpose of forming such a disulphide bridge, cysteine residues that naturally occur in said framework regions may be used, or alternatively cysteine residues may be synthetically added to or introduced into said framework regions). For a further description of these □Expedite fragments□, reference [symbol] [symbol] WO 03/050531, as well as to the US provisional application of Ablynx N.V. entitled “Peptides capable of binding to serum proteins.” of Ablynx N.V. (inventors: Revets, Hilde Adi Pierrette; Kolkman, Joost Alexander; and Hoogenboom, Hendricus Renerus Jacobus Mattheus) filed on Dec. 5, 2006 (see also PCT/EP2007/063348).

[0185] In another aspect, the invention relates to a compound or construct, and in particular a protein or polypeptide (also referred to herein as a □compound of the invention□polypeptide of the invention□, respectively) that comprises or essentially consists of one or more amino acid sequences of the invention (or suitable fragments thereof), and optionally further comprises one or more other groups, residues, moieties or binding units. As will become clear to the skilled person from the further disclosure herein, such further groups, residues, moieties, binding units or amino acid sequences may or may not provide further functionality to the amino acid sequence of the invention (and/or to the compound or construct in which it is present) and may or may not modify the properties of the amino acid sequence of the invention.

[0186] For example, such further groups, residues, moieties or binding units may be one or more additional amino acid sequences, such that the compound or construct is a (fusion) protein or (fusion) polypeptide. In a preferred but non-limiting aspect, said one or more other groups, residues, moieties or binding units are immunoglobulin sequences. Even more preferably, said one or more other groups, residues, moieties or binding units are chosen from the group consisting of domain antibodies, amino acid sequences that are suitable for use as a domain antibody, single domain antibodies, amino acid sequences that are suitable for use as a single domain antibody, “dAb”□s, amino acid sequences that are suitable for use as a dAb, or Nanobodies.

[0187] Alternatively, such groups, residues, moieties or binding units may for example be chemical groups, residues, moieties, which may or may not by themselves be biologically and/or pharmacologically active. For example, and without limitation, such groups may be linked to the one or more amino acid sequences of the invention so as to provide a □derivative□ of an amino acid sequence or polypeptide of the invention, as further described herein.

[0188] Also within the scope of the present invention are compounds or constructs, that comprises or essentially consists of one or more derivatives as described herein, and optionally further comprises one or more other groups, residues, moieties or binding units, optionally linked via one or more linkers. Preferably, said one or more other groups, residues, moieties or binding units are amino acid sequences.

[0189] In the compounds or constructs described above, the one or more amino acid sequences of the invention and the one or more groups, residues, moieties or binding units may be linked directly to each other and/or via one or more suitable linkers or spacers. For example, when the one or more groups, residues, moieties or binding units are amino acid sequences, the linkers may also be amino acid sequences, so that the resulting compound or construct is a fusion (protein) or fusion (polypeptide).

[0190] As will be clear from the further description above and herein, this means that the amino acid sequences of the invention can be used as □ building blocks□ to form polypeptides of the invention, i.e. by suitably combining them with other groups, residues, moieties or binding units, in order to form compounds or constructs as described herein (such as, without limitations, the biparatopic. bi/multivalent and bi/multispecific polypeptides of the invention described herein) which combine within one molecule one or more desired properties or biological functions.

[0191] The compounds or polypeptides of the invention can generally be prepared by a method which comprises at least one step of suitably linking the one or more amino acid sequences of the invention to the one or more further groups, residues, moieties or binding units, optionally via the one or more suitable linkers, so as to provide the compound or polypeptide of the invention. Polypeptides of the invention can also be prepared by a method which generally comprises at least the steps of providing a nucleic acid that encodes a polypeptide of the invention, expressing said nucleic acid in a suitable manner, and recovering the expressed polypeptide of the invention. Such methods can be performed in a manner known per se, which will be clear to the skilled person, for example on the basis of the methods and techniques further described herein.

[0192] The process of designing/selecting and/or preparing a compound or polypeptide of the invention, starting from an amino acid sequence of the invention, is also referred to herein as □formatting□ id amino acid sequence of the invention; and an amino acid of the invention that is made part of a compound or polypeptide of the invention is said to be □formatted□ or to be □in the format of □ said compound or polypeptide of the invention. Examples of way which an amino acid sequence of the invention can be formatted and examples of such formats will be clear to the skilled person based on the disclosure herein; and such formatted amino acid sequences form a further aspect of the invention.

[0193] In one specific aspect of the invention, a compound of the invention or a polypeptide of the invention may have an increased half-life, compared to the corresponding amino acid sequence of the invention. Some preferred, but non-limiting examples of such compounds and polypeptides will become clear to the skilled person based on the further disclosure herein, and for example comprise amino acid sequences or polypeptides of the invention that have been chemically modified to increase the half-life thereof (for example, by means of pegylation); amino acid sequences of the invention that comprise at least one additional binding site for binding to a serum protein (such as serum albumin); or polypeptides of the invention that comprise at least one amino acid sequence of the invention that is linked to at least one moiety (and in particular at least one amino acid sequence) that increases the half-life of the amino acid sequence of the invention. Examples of polypeptides of the invention that comprise such half-life extending moieties or amino acid sequences will become clear to the skilled person based on the further disclosure herein; and for example include, without limitation, polypeptides in which the one or more amino acid sequences of the invention are suitable linked to one or more serum proteins or fragments thereof (such as (human) serum albumin or suitable fragments thereof) or to one or more binding units that can bind to serum proteins (such as, for example, domain antibodies, amino acid sequences that are suitable for use as a domain antibody, single domain antibodies, amino acid sequences that are suitable for use as a single domain antibody, “dAb”□s, amino acid sequences that are suitable for use as a dAb, or Nanobodies that can bind to serum proteins such as serum albumin (such as human serum albumin), serum immunoglobulins such as IgG, or transferrine; reference is made to the further description and references mentioned herein); polypeptides in which an amino acid sequence of the invention is linked to an Fc portion (such as a human Fc) or a suitable part or fragment thereof; or polypeptides in which the one or more amino acid sequences of the invention are suitable linked to one or more small proteins or peptides that can bind to serum proteins (such as, without limitation, the proteins and peptides described in WO 91/01743, WO 01/45746, WO 02/076489 and to the US provisional application of Ablynx N.V. entitled “Peptides capable of binding to serum proteins” of Ablynx N.V. filed on Dec. 5, 2006 (see also PCT/EP2007/063348).

[0194] Generally, the compounds or polypeptides of the invention with increased half-life preferably have a half-life that is at least 1.5 times, preferably at least 2 times, such as at least 5 times, for example at least 10 times or more than 20 times, greater than the half-life of the corresponding amino acid sequence of the invention per se. For example, the compounds or polypeptides of the invention with increased half-life may have a half-life that is increased with more than 1 hours, preferably more than 2 hours, more preferably more than 6 hours, such as more than 12 hours, or even more than 24, 48 or 72 hours, compared to the corresponding amino acid sequence of the invention per se.

[0195] In a preferred, but non-limiting aspect of the invention, such compounds or polypeptides of the invention have a serum half-life that is increased with more than 1 hours, preferably more than 2 hours, more preferably more than 6 hours, such as more than 12 hours, or even more than 24, 48 or 72 hours, compared to the corresponding amino acid sequence of the invention per se.

[0196] In another preferred, but non-limiting aspect of the invention, such compounds or polypeptides of the invention exhibit a serum half-life in human of at least about 12 hours, preferably at least 24 hours, more preferably at least 48 hours, even more preferably at least 72 hours or more. For example, compounds or polypeptides of the invention may have a half-life of at least 5 days (such as about 5 to 10 days), preferably at least 9 days (such as about 9 to 14 days), more preferably at least about 10 days (such as about 10 to 15 days), or at least about 11 days (such as about 11 to 16 days), more preferably at least about 12 days (such as about 12 to 18 days or more), or more than 14 days (such as about 14 to 19 days).

[0197] In another aspect, the invention relates to a nucleic acid that encodes an amino acid sequence of the invention or a polypeptide of the invention (or a suitable fragment thereof). Such a nucleic acid will also be referred to herein as a □nucleic acid of the invention□ and may for example be in the form of a genetic construct, as further described herein.

[0198] In another aspect, the invention relates to a host or host cell that expresses (or that under suitable circumstances is capable of expressing) an amino acid sequence of the invention and/or a polypeptide of the invention; and/or that contains a nucleic acid of the invention. Some preferred but non-limiting examples of such hosts or host cells will become clear from the further description herein.

[0199] The invention further relates to a product or composition containing or comprising at least one amino acid sequence of the invention, at least one polypeptide of the invention (or a suitable fragment thereof) and/or at least one nucleic acid of the invention, and optionally one or more further components of such compositions known per se, i.e. depending on the intended use of the composition. Such a product or composition may for example be a pharmaceutical composition (as described herein), a veterinary composition or a product or composition for diagnostic use (as also described herein). Some preferred but non-limiting examples of such products or compositions will become clear from the further description herein.

[0200] The invention also relates to the use of an amino acid sequence, Nanobody or polypeptide of the invention, or of a composition comprising the same, in (methods or compositions for) modulating Integrins, either in vitro (e.g. in an in vitro or cellular assay) or in vivo (e.g. in an a single cell or in a multicellular organism, and in particular in a mammal, and more in particular in a human being, such as in a human being that is at risk of or suffers from an autoimmune diseases, cancer metastasis and thrombotic vascular diseases).

[0201] The invention also relates to methods for modulating Integrins, either in vitro (e.g. in an in vitro or cellular assay) or in vivo (e.g. in an a single cell or multicellular organism, and in particular in a mammal, and more in particular in a human being, such as in a human being that is at risk of or suffers from an autoimmune diseases, cancer metastasis and thrombotic vascular diseases), which method comprises at least the step of contacting Integrins with at least one amino acid sequence, Nanobody or polypeptide of the invention, or with a composition comprising the same, in a manner and in an amount suitable to modulate Integrins, with at least one amino acid sequence, Nanobody or polypeptide of the invention.

[0202] The invention also relates to the use of an one amino acid sequence, Nanobody or polypeptide of the invention in the preparation of a composition (such as, without limitation, a pharmaceutical composition or preparation as further described herein) for modulating Integrins, either in vitro (e.g. in an in vitro or cellular assay) or in vivo (e.g. in an a single cell or multicellular organism, and in particular in a mammal, and more in particular in a human being, such as in a human being that is at risk of or suffers from an autoimmune diseases, cancer metastasis and thrombotic vascular diseases).

[0203] In the context of the present invention, □modulating□ or □to modulate□ generally means either reducing or inhibiting the activity of, or alternatively increasing the activity of, Integrins, as measured using a suitable in vitro, cellular or in vivo assay (such as those mentioned herein). In particular, □modulating□ or □ to modulate□ may mean either redu inhibiting the activity of, or alternatively increasing the activity of Integrins, as measured using a suitable in vitro, cellular or in vivo assay (such as those mentioned herein), by at least 1%, preferably at least 5%, such as at least 10% or at least 25%, for example by at least 50%, at least 60%, at least 70%, at least 80%, or 90% or more, compared to activity of Integrins in the same assay under the same conditions but without the presence of the amino acid sequence, Nanobody or polypeptide of the invention.

[0204] As will be clear to the skilled person, □modulating□ may also involve effecting a change (which may either be an increase or a decrease) in affinity, avidity, specificity and/or selectivity of Integrins for one or more of its targets, ligands or substrates; and/or effecting a change (which may either be an increase or a decrease) in the sensitivity of Integrins for one or more conditions in the medium or surroundings in which Integrins is present (such as pH, ion strength, the presence of co-factors, etc.), compared to the same conditions but without the presence of the amino acid sequence, Nanobody or polypeptide of the invention. As will be clear to the skilled person, this may again be determined in any suitable manner and/or using any suitable assay known per se, such as the assays described herein or in the prior art cited herein.

[0205] □Modulating□ also mean effecting a change (i.e. an activity as an agonist or as an antagonist, respectively) with respect to one or more biological or physiological mechanisms, effects, responses, functions, pathways or activities in which Integrins (or in which its substrate(s), ligand(s) or pathway(s) are involved, such as its signalling pathway or metabolic pathway and their associated biological or physiological effects) is involved. Again, as will be clear to the skilled person, such an action as an agonist or an antagonist may be determined in any suitable manner and/or using any suitable (in vitro and usually cellular or in assay) assay known per se, such as the assays described herein or in the prior art cited herein. In particular, an action as an agonist or antagonist may be such that an intended biological or physiological activity is increased or decreased, respectively, by at least 1%, preferably at least 5%, such as at least 10% or at least 25%, for example by at least 50%, at least 60%, at least 70%, at least 80%, or 90% or more, compared to the biological or physiological activity in the same assay under the same conditions but without the presence of the amino acid sequence, Nanobody or polypeptide of the invention.

[0206] Modulating may for example involve reducing or inhibiting the binding of Integrins to one of its substrates or ligands and/or competing with a natural ligand, substrate for binding to Integrins. Modulating may also involve activating Integrins or the mechanism or pathway in which it is involved. Modulating may be reversible or irreversible, but for pharmaceutical and pharmacological purposes will usually be in a reversible manner.

[0207] The invention further relates to methods for preparing or generating the amino acid sequences, polypeptides, nucleic acids, host cells, products and compositions described herein. Some preferred but non-limiting examples of such methods will become clear from the further description herein.

[0208] Generally, these methods may comprise the steps of:
[0209] a) providing a set, collection or library of amino acid sequences; and
[0210] b) screening said set, collection or library of amino acid sequences for amino acid sequences that can bind to and/or have affinity for Integrins; and
[0211] c) isolating the amino acid sequence(s) that can bind to and/or have affinity for Integrins.

[0212] In such a method, the set, collection or library of amino acid sequences may be any suitable set, collection or library of amino acid sequences. For example, the set, collection or library of amino acid sequences may be a set, collection or library of immunoglobulin sequences (as described herein), such as a naïve set, collection or library of immunoglobulin sequences; a synthetic or semi-synthetic set, collection or library of immunoglobulin sequences; and/or a set, collection or library of immunoglobulin sequences that have been subjected to affinity maturation.

[0213] Also, in such a method, the set, collection or library of amino acid sequences may be a set, collection or library of heavy chain variable domains (such as V_{H} domains or V_{HH} domains) or of light chain variable domains. For example, the set, collection or library of amino acid sequences may be a set, collection or library of domain antibodies or single domain antibodies, or may be a set, collection or library of amino acid sequences that are capable of functioning as a domain antibody or single domain antibody.

[0214] In a preferred aspect of this method, the set, collection or library of amino acid sequences may be an immune set, collection or library of immunoglobulin sequences, for example derived from a mammal that has been suitably immunized with Integrins or with a suitable antigenic determinant based thereon or derived therefrom, such as an antigenic part, fragment, region, domain, loop or other epitope thereof. In one particular aspect, said antigenic determinant may be an extracellular part, region, domain, loop or other extracellular epitope(s).

[0215] In the above methods, the set, collection or library of amino acid sequences may be displayed on a phage, phagemid, ribosome or suitable micro-organism (such as yeast), such as to facilitate screening. Suitable methods, techniques and host organisms for displaying and screening (a set, collection or library of) amino acid sequences will be clear to the person skilled in the art, for example on the basis of the further disclosure herein. Reference is also made to the review by Hoogenboom in Nature Biotechnology, 23, 9, 1105-1116 (2005).

[0216] In another aspect, the method for generating amino acid sequences comprises at least the steps of:
[0217] a) providing a collection or sample of cells expressing amino acid sequences;
[0218] b) screening said collection or sample of cells for cells that express an amino acid sequence that can bind to and/or have affinity for Integrins;
   and
[0219] c) either (i) isolating said amino acid sequence; or (ii) isolating from said cell a nucleic acid sequence that encodes said amino acid sequence, followed by expressing said amino acid sequence.

[0220] For example, when the desired amino acid sequence is an immunoglobulin sequence, the collection or sample of cells may for example be a collection or sample of B-cells. Also, in this method, the sample of cells may be derived from a mammal that has been suitably immunized with Integrins or with a suitable antigenic determinant based thereon or derived therefrom, such as an antigenic part, fragment, region, domain, loop or other epitope thereof. In one particular aspect, said antigenic determinant may be an extracellular part, region, domain, loop or other extracellular epitope(s).

[0221] The above method may be performed in any suitable manner, as will be clear to the skilled person. Reference is for example made to EP 0 542 810, WO 05/19824, WO 04/051268 and WO 04/106377. The screening of step b) is preferably performed using a flow cytometry technique such as FACS. For this, reference is for example made to Lieby et al., Blood, Vol. 97, No. 12, 3820 (2001).

[0222] In another aspect, the method for generating an amino acid sequence directed against Integrins may comprise at least the steps of:
[0223] a) providing a set, collection or library of nucleic acid sequences encoding amino acid sequences;
[0224] b) screening said set, collection or library of nucleic acid sequences for nucleic acid sequences that encode an amino acid sequence that can bind to and/or has affinity for Integrins;
   and
[0225] c) isolating said nucleic acid sequence, followed by expressing said amino acid sequence.

[0226] In such a method, the set, collection or library of nucleic acid sequences encoding amino acid sequences may for example be a set, collection or library of nucleic acid sequences encoding a naïve set, collection or library of immunoglobulin sequences; a set, collection or library of nucleic acid sequences encoding a synthetic or semi-synthetic set, collection or library of immunoglobulin sequences; and/or a set, collection or library of nucleic acid sequences encoding a set, collection or library of immunoglobulin sequences that have been subjected to affinity maturation.

[0227] Also, in such a method, the set, collection or library of nucleic acid sequences may encode a set, collection or library of heavy chain variable domains (such as V_{H} domains or V_{HH} domains) or of light chain variable domains. For example, the set, collection or library of nucleic acid sequences may encode a set, collection or library of domain antibodies or single domain antibodies, or a set, collection or library of amino acid sequences that are capable of functioning as a domain antibody or single domain antibody.

[0228] In a preferred aspect of this method, the set, collection or library of amino acid sequences may be an immune set, collection or library of nucleic acid sequences, for example derived from a mammal that has been suitably immunized with Integrins or with a suitable antigenic determinant based thereon or derived therefrom, such as an antigenic part, fragment, region, domain, loop or other epitope thereof. In one particular aspect, said antigenic determinant may be an extracellular part, region, domain, loop or other extracellular epitope(s).

[0229] The set, collection or library of nucleic acid sequences may for example encode an immune set, collection or library of heavy chain variable domains or of light chain variable domains. In one specific aspect, the set, collection or library of nucleotide sequences may encode a set, collection or library of V_{HH} sequences.

[0230] In the above methods, the set, collection or library of nucleotide sequences may be displayed on a phage, phagemid, ribosome or suitable micro-organism (such as yeast), such as to facilitate screening. Suitable methods, techniques and host organisms for displaying and screening (a set, collection or library of) nucleotide sequences encoding amino acid sequences will be clear to the person skilled in the art, for example on the basis of the further disclosure herein. Reference is also made to the review by Hoogenboom in Nature Biotechnology, 23, 9, 1105-1116 (2005).

[0231] In another aspect, the method for generating an amino acid sequence directed against Integrins may comprise at least the steps of:
[0232] a) providing a set, collection or library of nucleic acid sequences encoding amino acid sequences;
[0233] b) screening said set, collection or library of nucleic acid sequences for nucleic acid sequences that encode an amino acid sequence that can bind to and/or has affinity for Integrins and that is cross-blocked or is cross blocking a Nanobody of the invention, e.g. SEQ ID NO: 1316 to 1476, and SEQ ID NO: 1485, 1486, and 1487 (Table-1); and
[0234] c) isolating said nucleic acid sequence, followed by expressing said amino acid sequence.

[0235] The invention also relates to amino acid sequences that are obtained by the above methods, or alternatively by a method that comprises the one of the above methods and in addition at least the steps of determining the nucleotide sequence or amino acid sequence of said immunoglobulin sequence; and of expressing or synthesizing said amino acid sequence in a manner known per se, such as by expression in a suitable host cell or host organism or by chemical synthesis.

[0236] Also, following the steps above, one or more amino acid sequences of the invention may be suitably humanized (or alternatively camelized); and/or the amino acid sequence(s) thus obtained may be linked to each other or to one or more other suitable amino acid sequences (optionally via one or more suitable linkers) so as to provide a polypeptide of the invention. Also, a nucleic acid sequence encoding an amino acid sequence of the invention may be suitably humanized (or alternatively camelized) and suitably expressed; and/or one or more nucleic acid sequences encoding an amino acid sequence of the invention may be linked to each other or to one or more nucleic acid sequences that encode other suitable amino acid sequences (optionally via nucleotide sequences that encode one or more suitable linkers), after which the nucleotide sequence thus obtained may be suitably expressed so as to provide a polypeptide of the invention.

[0237] The invention further relates to applications and uses of the amino acid sequences, compounds, constructs, polypeptides, nucleic acids, host cells, products and compositions described herein, as well as to methods for the prevention and/or treatment for diseases and disorders associated with Integrins. Some preferred but non-limiting applications and uses will become clear from the further description herein.

[0238] The invention also relates to the amino acid sequences, compounds, constructs, polypeptides, nucleic acids, host cells, products and compositions described herein for use in therapy. In particular, the invention also relates to the amino acid sequences, compounds, constructs, polypeptides, nucleic acids, host cells, products and compositions described herein for use in therapy of a disease or disorder that can be prevented or treated by administering, to a subject in need thereof, of (a pharmaceutically effective amount of) an amino acid sequence, compound, construct or polypeptide as described herein.

[0239] More in particular, the invention relates to the amino acid sequences, compounds, constructs, polypeptides, nucleic acids, host cells, products and compositions described herein for use in therapy of autoimmune diseases, cancer metastasis and thrombotic vascular diseases. Other aspects, embodiments, advantages and applications of the invention will also become clear from the further description herein, in which the invention will be described and discussed in more detail with reference to the Nanobodies of the invention and polypeptides of the invention comprising the same, which form some of the preferred aspects of the invention.

[0240] As will become clear from the further description herein, Nanobodies generally offer certain advantages (outlined herein) compared to □dAb□s□ or similar (single) domain antibodies or immunoglobulin sequences, which advantages are also provided by the Nanobodies of the invention. However, it will be clear to the skilled person that the more general aspects of the teaching below can also be applied (either directly or analogously) to other amino acid sequences of the invention.

### DETAILED DESCRIPTION OF THE INVENTION

[0241] In the present description, examples and claims:
[0242] a) Unless indicated or defined otherwise, all terms used have their usual meaning in the art, which will be clear to the skilled person. Reference is for example made to the standard handbooks mentioned in paragraph a) on page 46 of WO 08/020,079.
[0243] b) Unless indicated otherwise, the terms □immunoglobulin sequence□, □sequence□, □nucleotide sequence□ and □nucleic acid□ are as described in paragraph b) on pa of WO 08/020,079.
[0244] c) Unless indicated otherwise, all methods, steps, techniques and manipulations that are not specifically described in detail can be performed and have been performed in a manner known per se, as will be clear to the skilled person. Reference is for example again made to the standard handbooks and the general background art mentioned herein and to the further references cited therein; as well as to for example the following reviews Presta, Adv. Drug Deliv. Rev. 2006, 58 (5-6): 640-56; Levin and Weiss, Mol. Biosyst. 2006, 2(1): 49-57; Irving et al., J. Immunol. Methods, 2001, 248(1-2), 31-45; Schmitz et al., Placenta, 2000, 21 Suppl. A, S106-12, Gonzales et al., Tumour Biol., 2005, 26(1), 31-43, which describe techniques for protein engineering, such as affinity maturation and other techniques for improving the specificity and other desired properties of proteins such as immunoglobulins.
[0245] d) Amino acid residues will be indicated according to the standard three-letter or one-letter amino acid code. Reference is made to Table A-2 on page 48 of the International application WO 08/020,079 of Ablynx N.V. entitled □Amino acid sequences directed against IL-6R and polypeptides comprising the same for the treatment of diseases and disorders associated with 11-6 mediated signalling□.
[0246] e) For the purposes of comparing two or more nucleotide sequences, the percentage of □sequence identity□ between a first nucleotide sequence and a second nucleotide sequence may be calculated or determined as described in paragraph c) on page 49 of WO 08/020,079 (incorporated herein by reference), such as by dividing [the number of nucleotides in the first nucleotide sequence that are identical to the nucleotides at the corresponding positions in the second nucleotide sequence] by [the total number of nucleotides in the first nucleotide sequence] and multiplying by [100%], in which each deletion, insertion, substitution or addition of a nucleotide in the second nucleotide sequence—compared to the first nucleotide sequence—is considered as a difference at a single nucleotide (position); or using a suitable computer algorithm or technique, again as described in paragraph c) on pages 49 of WO 08/020,079 (incorporated herein by reference).
[0247] f) For the purposes of comparing two or more amino acid sequences, the percentage of □sequence identity□ between a first amino acid sequence [symbol] [symbol] second amino acid sequence (also referred to herein as □amino acid identity □may be calculated or determined as described in paragraph 0 on pages 49 and 50 of WO 08/020,079 (incorporated herein by reference), such as by dividing [the number of amino acid residues in the first amino acid sequence that are identical to the amino acid residues at the corresponding positions in the second amino acid sequence] by [the total number of amino acid residues in the first amino acid sequence] and multiplying by [100%], in which each deletion, insertion, substitution or addition of an amino acid residue in the second amino acid sequence—compared to the first amino acid sequence—is considered as a difference at a single amino acid residue (position), i.e. as an □amino acid difference□ as defined herein; or using a suitable computer algorithm or technique, again as described in paragraph f) on pages 49 and 50 of WO 08/020,079 (incorporated herein by reference). Also, in determining the degree of sequence identity between two amino acid sequences, the skilled person may take into account so-called □conservative□ amino acid substitutions, as described on ps WO [symbol] [symbol] /020079. Any amino acid substitutions applied to the polypeptides described herein may also be based on the analysis of the frequencies of amino acid variations between homologous proteins of different species developed by Schulz et al., Principles of Protein Structure, Springer-Verlag, 1978, on the analyses of structure forming potentials developed by Chou and Fasman, Biochemistry 13: 211, 1974 and Adv. Enzymol., 47: 45-149, 1978, and on the analysis of hydrophobicity patterns in proteins developed by Eisenberg et al., Proc. Natl. Acad. Sci. USA 81: 140-144, 1984; Kyte & Doolittle; J. Molcc. Biol. 157: 105-132, 198 1, and Goldman et al., Ann. Rev. Biophys. Chem. 15: 321-353, 1986, all incorporated herein in their entirety by reference. Information on the primary, secondary and tertiary structure of Nanobodies is given in the description herein and in the general background art cited above. Also, for this purpose, the crystal structure of a V_{HH} domain from a llama is for example given by Desmyter et al., Nature Structural Biology, Vol. 3, 9, 803 (1996); Spinelli et al., Natural Structural Biology (1996); 3, 752-757; and Decanniere et al., Structure, Vol. 7, 4, 361 (1999). Further information about some of the amino acid residues that in conventional V_{H} domains form the V_{H}/V_{L} interface and potential camelizing substitutions on these positions can be found in the prior art cited above.
[0248] g) Amino acid sequences and nucleic acid sequences are said to be □exactly the same□ if they have 100% sequence identity (as defined herein) over their entire length.
[0249] h) When comparing two amino acid sequences, the term □amino acid difference□ refers to an insertion, deletion or substitution of a single amino acid residue on a position of the first sequence, compared to the second sequence; it being understood that two amino acid sequences can contain one, two or more such amino acid differences.
[0250] i) When a nucleotide sequence or amino acid sequence is said to □comprise□ another nucleotide sequence or amino acid sequence, respectively, or to □essentially consist of□ another nucleotide sequence or amino acid sequence, this has the meaning given in paragraph i) on pages 51-52 of WO 08/020,079.
[0251] j) The term □essentially isolated form□ has the meaning given to it in paragraph j) on pages 52 and 53 of WO 08/020,079.
[0252] k) The terms □domain□ and □binding domain□ have the meanings [symbol] [symbol] iven to it in pare k) on page 53 of WO 08/020,079.
[0253] l) The terms □antigenic determinant□ [symbol] [symbol] □, which may also be used interchangeably herein have the meanings given to it in paragraph l) on page 53 of WO 08/020,079.
[0254] m) As further described in paragraph m) on page 53 of WO 08/020,079, an amino acid sequence (such as a Nanobody, an antibody, a polypeptide of the invention, or generally an antigen binding protein or polypeptide or a fragment thereof) that can (specifically) bind to, that has affinity for and/or that has specificity for a specific antigenic determinant, epitope, antigen or protein (or for at least one part, fragment or epitope thereof) is said to be □against□ directed against□ said antigenic determinant, epitope, antigen or protein.
[0255] n) The term □specificity□ has the meaning given to it in paragraph n) on page [symbol] [symbol] f WO 08/020,079; and as mentioned therein refers to the number of different types of antigens or antigenic determinants to which a particular antigen-binding molecule or antigen-binding protein (such as a Nanobody or a polypeptide of the invention) molecule can bind. The specificity of an antigen-binding protein can be determined based on affinity and/or avidity, as described on pages 53-56 of WO 08/020,079 (incorporated herein by reference), which also describes some preferred techniques for measuring binding between an antigen-binding molecule (such as a Nanobody or polypeptide of the invention) and the pertinent antigen. Typically, antigen-binding proteins (such as the amino acid sequences, Nanobodies and/or polypeptides of the invention) will bind to their antigen with a dissociation constant (K_{D}) of 10⁻⁵ to 10⁻¹² moles/liter or less, and preferably 10⁻⁷ to 10⁻¹² moles/liter or less and more preferably 10⁻⁸ to 10⁻¹² moles/liter (i.e. with an association constant (K_{A}) of 10⁵ to 10¹² liter/moles or more, and preferably 10⁷ to 10¹² liter/moles or more and more preferably 10⁸ to 10¹² liter/moles). Any K_{D} value greater than 10⁴ mol/liter (or any K_{A} value lower than 10⁴ M⁻¹) liters/mol is generally considered to indicate non-specific binding. Preferably, a monovalent immunoglobulin sequence of the invention will bind to the desired antigen with an affinity less than 500 nM, preferably less than 200 nM, more preferably less than 10 nM, such as less than 500 pM. Specific binding of an antigen-binding protein to an antigen or antigenic determinant can be determined in any suitable manner known per se, including, for example, Scatchard analysis and/or competitive binding assays, such as radioimmunoassays (RIA), enzyme immunoassays (EIA) and sandwich competition assays, and the different variants thereof known per se in the art; as well as the other techniques mentioned herein. As will be clear to the skilled person, and as described on pages 53-56 of WO 08/020,079, the dissociation constant may be the actual or apparent dissociation constant. Methods for determining the dissociation constant will be clear to the skilled person, and for example include the techniques mentioned on pages 53-56 of WO 08/020,079. The half-life of an amino acid sequence, compound or polypeptide of the invention can generally be defined as described in paragraph o) on page 57 of WO 08/020,079 and as mentioned therein refers to the time taken for the serum concentration of the amino acid sequence, compound or polypeptide to be reduced by 50%, in vivo, for example due to degradation of the sequence or compound and/or clearance or sequestration of the sequence or compound by natural mechanisms. The in vivo half-life of an amino acid sequence, compound or polypeptide of the invention can be determined in any manner known per se, such as by pharmacokinetic analysis. Suitable techniques will be clear to the person skilled in the art, and may for example generally be as described in paragraph o) on page 57 of WO 08/020,079. As also mentioned in paragraph o) on page 57 of WO 08/020,079, the half-life can be expressed using parameters such as the t1/2-alpha, t1/2-beta and the area under the curve (AUC). Reference is for example made to the Experimental Part below, as well as to the standard handbooks, such as Kenneth, A et al: Chemical Stability of Pharmaceuticals: A Handbook for Pharmacists and Peters et al, Pharmacokinete analysis: A Practical Approach (1996). Reference is also made to “Pharmacokinetics”, M Gibaldi & D Perron, published by Marcel Dekker, 2nd Rev. edition (1982). The terms □increase or [symbol] [symbol] or □ [symbol] [symbol] half as also as defined in paragraph o) on page 57 of WO 08/020,079 and in particular refer to an increase in the t1/2-beta, either with or without an increase in the t1/2-alpha and/or the AUC or both.
[0256] o) In the context of the present invention, □modulating□ or □to modulate□ generally either reducing or inhibiting the activity of, or alternatively increasing the activity of, a target or antigen, as measured using a suitable in vitro, cellular or in vivo assay. In particular, □modulating□ or □to modulate□ may mean either reducing or inhibiting activity of, or alternatively increasing a (relevant or intended) biological activity of, a target or antigen, as measured using a suitable in vitro, cellular or in vivo assay (which will usually depend on the target or antigen involved), by at least 1%, preferably at least 5%, such as at least 10% or at least 25%, for example by at least 50%, at least 60%, at least 70%, at least 80%, or 90% or more, compared to activity of the target or antigen in the same assay under the same conditions but without the presence of the construct of the invention. As will be clear to the skilled person, □modulating□ may also involve effecting a change (which may either be an increase or a decrease) in affinity, avidity, specificity and/or selectivity of a target or antigen for one or more of its ligands, binding partners, partners for association into a homomultimeric or heteromultimeric form, or substrates; and/or effecting a change (which may either be an increase or a decrease) in the sensitivity of the target or antigen for one or more conditions in the medium or surroundings in which the target or antigen is present (such as pH, ion strength, the presence of co-factors, etc.), compared to the same conditions but without the presence of the construct of the invention. As will be clear to the skilled person, this may again be determined in any suitable manner and/or using any suitable assay known per se, depending on the target or antigen involved. □Modulating□ may also mean effecting a change (i.e. an activity as an agonist, as an antagonist or as a reverse agonist, respectively, depending on the target or antigen and the desired biological or physiological effect) with respect to one or more biological or physiological mechanisms, effects, responses, functions, pathways or activities in which the target or antigen (or in which its substrate(s), ligand(s) or pathway(s) are involved, such as its signalling pathway or metabolic pathway and their associated biological or physiological effects) is involved. Again, as will be clear to the skilled person, such an action as an agonist or an antagonist may be determined in any suitable manner and/or using any suitable (in vitro and usually cellular or in assay) assay known per se, depending on the target or antigen involved. In particular, an action as an agonist or antagonist may be such that an intended biological or physiological activity is increased or decreased, respectively, by at least 1%, preferably at least 5%, such as at least 10% or at least 25%, for example by at least 50%, at least 60%, at least 70%, at least 80%, or 90% or more, compared to the biological or physiological activity in the same assay under the same conditions but without the presence of the construct of the invention. Modulating may for example also involve allosteric modulation of the target or antigen; and/or reducing or inhibiting the binding of the target or antigen to one of its substrates or ligands and/or competing with a natural ligand, substrate for binding to the target or antigen. Modulating may also involve activating the target or antigen or the mechanism or pathway in which it is involved. Modulating may for example also involve effecting a change in respect of the folding or confirmation of the target or antigen, or in respect of the ability of the target or antigen to fold, to change its confirmation (for example, upon binding of a ligand), to associate with other (sub)units, or to disassociate. Modulating may for example also involve effecting a change in the ability of the target or antigen to transport other compounds or to serve as a channel for other compounds (such as ions). Modulating may be reversible or irreversible, but for pharmaceutical and pharmacological purposes will usually be in a reversible manner.
[0257] p) In respect of a target or antigen, the term □interaction site□ on the target or antigen means a site, epitope, antigenic determinant, part, domain or stretch of amino acid residues on the target or antigen that is a site for binding to a ligand, receptor or other binding partner, a catalytic site, a cleavage site, a site for allosteric interaction, a site involved in multimerisation (such as homomerization or heterodimerization) of the target or antigen; or any other site, epitope, antigenic determinant, part, domain or stretch of amino acid residues on the target or antigen that is involved in a biological action or mechanism of the target or antigen. More generally, an □interaction site□ can be any site, epitope, antigenic determinant, part, domain or stretch of amino acid residues on the target or antigen to which an amino acid sequence or polypeptide of the invention can bind such that the target or antigen (and/or any pathway, interaction, signalling, biological mechanism or biological effect in which the target or antigen is involved) is modulated (as defined herein).
[0258] q) An amino acid sequence or polypeptide is said to be □specific for□ a first target or antigen compared to a second target or antigen when is binds to the first antigen with an affinity (as described above, and suitably expressed as a K_{D} value, K_{A} value, K_{off} rate and/or Kₒₙ rate) that is at least 10 times, such as at least 100 times, and preferably at least 1000 times, and up to 10.000 times or more better than the affinity with which said amino acid sequence or polypeptide binds to the second target or polypeptide. For example, the first antigen may bind to the target or antigen with a K_{D} value that is at least 10 times less, such as at least 100 times less, and preferably at least 1000 times less, such as 10.000 times less or even less than that, than the K_{D} with which said amino acid sequence or polypeptide binds to the second target or polypeptide. Preferably, when an amino acid sequence or polypeptide is □specific for□ a first target or antigen compared to a second target or antigen, it is directed against (as defined herein) said first target or antigen, but not directed against said second target or antigen.
[0259] r) The terms □cross-block□ cross-blocked□ and cross-blocking□ are used interchangeably herein to mean the ability of an amino acid sequence or other binding agents (such as a polypeptide of the invention) to interfere with the binding of other amino acid sequences or binding agents of the invention to a given target. The extend to which an amino acid sequence or other binding agents of the invention is able to interfere with the binding of another, and therefore whether it can be said to cross-block according to the invention, can be determined using competition binding assays. One particularly suitable quantitative assay uses a Biacore machine which can measure the extent of interactions using surface plasmon resonance technology. Another suitable quantitative cross-blocking assay uses an ELISA-based approach to measure competition between amino acid sequence or another binding agents in terms of their binding to the target. The following generally describes a suitable Biacore assay for determining whether an amino acid sequence or other binding agent cross-blocks or is capable of cross-blocking according to the invention. It will be appreciated that the assay can be used with any of the amino acid sequence or other binding agents described herein. The Biacore machine (for example the Biacore 3000) is operated in line with the manufacturer's recommendations. Thus in one cross-blocking assay, the target protein is coupled to a CM5 Biacore chip using standard amine coupling chemistry to generate a surface that is coated with the target. Typically 200-800 resonance units of the target would be coupled to the chip (an amount that gives easily measurable levels of binding but that is readily saturable by the concentrations of test reagent being used). Two test amino acid sequences (termed A* and B*) to be assessed for their ability to cross-block each other are mixed at a one to one molar ratio of binding sites in a suitable buffer to create the test mixture. When calculating the concentrations on a binding site basis the molecular weight of an amino acid sequence is assumed to be the total molecular weight of the amino acid sequence divided by the number of target binding sites on that amino acid sequence. The concentration of each amino acid sequence in the test mix should be high enough to readily saturate the binding sites for that amino acid sequence on the target molecules captured on the Biacore chip. The amino acid sequences in the mixture are at the same molar concentration (on a binding basis) and that concentration would typically be between 1.00 and 1.5 micromolar (on a binding site basis). Separate solutions containing A* alone and B* alone are also prepared. A* and B* in these solutions should be in the same buffer and at the same concentration as in the test mix. The test mixture is passed over the target-coated Biacore chip and the total amount of binding recorded. The chip is then treated in such a way as to remove the bound amino acid sequences without damaging the chip-bound target. Typically this is done by treating the chip with 30 mM HCl for 60 seconds. The solution of A* alone is then passed over the target-coated surface and the amount of binding recorded. The chip is again treated to remove all of the bound amino acid sequences without damaging the chip-bound target. The solution of B* alone is then passed over the target-coated surface and the amount of binding recorded. The maximum theoretical binding of the mixture of A* and B* is next calculated, and is the sum of the binding of each amino acid sequence when passed over the target surface alone. If the actual recorded binding of the mixture is less than this theoretical maximum then the two amino acid sequences are cross-blocking each other. Thus, in general, a cross-blocking amino acid sequence or other binding agent according to the invention is one which will bind to the target in the above Biacore cross-blocking assay such that during the assay and in the presence of a second amino acid sequence or other binding agent of the invention the recorded binding is between 80% and 0.1% (e.g. 80% to 4%) of the maximum theoretical binding, specifically between 75% and 0.1% (e.g. 75% to 4%) of the maximum theoretical binding, and more specifically between 70% and 0.1% (e.g. 70% to 4%) of maximum theoretical binding (as just defined above) of the two amino acid sequences or binding agents in combination. The Biacore assay described above is a primary assay used to determine if amino acid sequences or other binding agents cross-block each other according to the invention. On rare occasions particular amino acid sequences or other binding agents may not bind to target coupled via amine chemistry to a CM5 Biacore chip (this usually occurs when the relevant binding site on target is masked or destroyed by the coupling to the chip). In such cases cross-blocking can be determined using a tagged version of the target, for example a N-terminal His-tagged version (R & D Systems, Minneapolis, Minn., USA; 2005 cat# 1406-ST-025). In this particular format, an anti-His amino acid sequence would be coupled to the Biacore chip and then the His-tagged target would be passed over the surface of the chip and captured by the anti-His amino acid sequence. The cross blocking analysis would be carried out essentially as described above, except that after each chip regeneration cycle, new His-tagged target would be loaded back onto the anti-His amino acid sequence coated surface. In addition to the example given using N-terminal His-tagged target, C-terminal His-tagged target could alternatively be used. Furthermore, various other tags and tag binding protein combinations that are known in the art could be used for such a cross-blocking analysis (e.g. HA tag with anti-FIA antibodies; FLAG tag with anti-FLAG antibodies; biotin tag with streptavidin). The following generally describes an ELISA assay for determining whether an amino acid sequence or other binding agent directed against a target cross-blocks or is capable of cross-blocking as defined herein. It will be appreciated that the assay can be used with any of the amino acid sequences (or other binding agents such as polypeptides of the invention) described herein. The general principal of the assay is to have an amino acid sequence or binding agent that is directed against the target coated onto the wells of an ELISA plate. An excess amount of a second, potentially cross-blocking, anti-target amino acid sequence is added in solution (i.e. not bound to the ELISA plate). A limited amount of the target is then added to the wells. The coated amino acid sequence and the amino acid sequence in solution compete for binding of the limited number of target molecules. The plate is washed to remove excess target that has not been bound by the coated amino acid sequence and to also remove the second, solution phase amino acid sequence as well as any complexes formed between the second, solution phase amino acid sequence and target. The amount of bound target is then measured using a reagent that is appropriate to detect the target. An amino acid sequence in solution that is able to cross-block the coated amino acid sequence will be able to cause a decrease in the number of target molecules that the coated amino acid sequence can bind relative to the number of target molecules that the coated amino acid sequence can bind in the absence of the second, solution phase, amino acid sequence. In the instance where the first amino acid sequence, e.g. an Ab-X, is chosen to be the immobilized amino acid sequence, it is coated onto the wells of the ELISA plate, after which the plates are blocked with a suitable blocking solution to minimize non-specific binding of reagents that are subsequently added. An excess amount of the second amino acid sequence, i.e. Ab-Y, is then added to the ELISA plate such that the moles of Ab-Y target binding sites per well are at least 10 fold higher than the moles of Ab-X target binding sites that were used, per well, during the coating of the ELISA plate. Target is then added such that the moles of target added per well are at least 25-fold lower than the moles of Ab-X target binding sites that were used for coating each well. Following a suitable incubation period the ELISA plate is washed and a reagent for detecting the target is added to measure the amount of target specifically bound by the coated anti-target amino acid sequence (in this case Ab-X). The background signal for the assay is defined as the signal obtained in wells with the coated amino acid sequence (in this case Ab-X), second solution phase amino acid sequence (in this case Ab-Y), [target] buffer only (i.e. no target) and target detection reagents. The positive control signal for the assay is defined as the signal obtained in wells with the coated amino acid sequence (in this case Ab-X), second solution phase amino acid sequence buffer only (i.e. no second solution phase amino acid sequence), target and target detection reagents. The ELISA assay may be run in such a manner so as to have the positive control signal be at least 6 times the background signal. To avoid any artefacts (e.g. significantly different affinities between Ab-X and Ab-Y for target) resulting from the choice of which amino acid sequence to use as the coating amino acid sequence and which to use as the second (competitor) amino acid sequence, the cross-blocking assay may to be run in two formats: 1) format 1 is where Ab-X is the amino acid sequence that is coated onto the ELISA plate and Ab-Y is the competitor amino acid sequence that is in solution and 2) format 2 is where Ab-Y is the amino acid sequence that is coated onto the ELISA plate and Ab-X is the competitor amino acid sequence that is in solution. Ab-X and Ab-Y are defined as cross-blocking if, either in format 1 or in format 2, the solution phase anti-target amino acid sequence is able to cause a reduction of between 60% and 100%, specifically between 70% and 100%, and more specifically between 80% and 100%, of the target detection signal (i.e. the amount of target bound by the coated amino acid sequence) as compared to the target detection signal obtained in the absence of the solution phase anti-target amino acid sequence (i.e. the positive control wells).
[0260] s) As further described herein, the total number of amino acid residues in a Nanobody can be in the region of 110-120, is preferably 112-115, and is most preferably 113. It should however be noted that parts, fragments, analogs or derivatives (as further described herein) of a Nanobody are not particularly limited as to their length and/or size, as long as such parts, fragments, analogs or derivatives meet the further requirements outlined herein and are also preferably suitable for the purposes described herein. As further described in paragraph q) on pages 58 and 59 of WO 08/020,079 (incorporated herein by reference), the amino acid residues of a Nanobody are numbered according to the general numbering for V_{H} domains given by Kabat et al. (□Sequence of proteins immunological interest□, US Public Health Service NIH Bethesda, Md., Publication No. 91), as applied to V_{HH} domains from Camelids in the article of Riechmann and Muyldermans, J. Immunol. Methods 2000 Jun. 23; 240 (1-2): 185-195 (see for example FIG. 2 of this publication), and accordingly FR1 of a Nanobody comprises the amino acid residues at positions 1-30, CDR1 of a Nanobody comprises the amino acid residues at positions 31-35, FR2 of a Nanobody comprises the amino acids at positions 36-49, CDR2 of a Nanobody comprises the amino acid residues at positions 50-65, FR3 of a Nanobody comprises the amino acid residues at positions 66-94, CDR3 of a Nanobody comprises the amino acid residues at positions 95-102, and FR4 of a Nanobody comprises the amino acid residues at positions 103-113.
[0261] t) The Figures, Sequence Listing and the Experimental Part/Examples are only given to further illustrate the invention and should not be interpreted or construed as limiting the scope of the invention and/or of the appended claims in any way, unless explicitly indicated otherwise herein.

[0262] For a general description of heavy chain antibodies and the variable domains thereof, reference is inter alia made to the prior art cited herein, as well as to the prior art mentioned on page 59 of WO 08/020,079 and to the list of references mentioned on pages 41-43 of the International application WO 06/040153, which prior art and references are incorporated herein by reference.

[0263] In accordance with the terminology used in the art (see the above references), the variable domains present in naturally occurring heavy chain antibodies will also be referred to as □V_{HH} domains□, in order to distinguish them from the heavy chain variable domains that are present in conventional 4-chain antibodies (which will be referred to hereinbelow as □V_{H} domains□) [symbol] [symbol] the light chain variable domains that are present in conventional 4-chain antibodies (which will be referred to hereinbelow as □V_{L}, domains□).

[0264] As mentioned in the prior art referred to above, V_{HH} domains have a number of unique structural characteristics and functional properties which make isolated V_{HH} domains (as well as Nanobodies based thereon, which share these structural characteristics and functional properties with the naturally occurring V_{HH} domains) and proteins containing the same highly advantageous for use as functional antigen-binding domains or proteins. In particular, and without being limited thereto, V_{HH} domains (which have been □designed□ by nature to functionally bind to an antigen without the presence of, and without any interaction with, a light chain variable domain) and Nanobodies can function as a single, relatively small, functional antigen-binding structural unit, domain or protein. This distinguishes the V_{HH} domains from the V_{H} and V_{I}, domains of conventional 4-chain antibodies, which by themselves are generally not suited for practical application as single antigen-binding proteins or domains, but need to be combined in some form or another to provide a functional antigen-binding unit (as in for example conventional antibody fragments such as Fab fragments; in ScFv□s fragments, which consist of [symbol] [symbol] domain covalently linked to a V_{L} domain).

[0265] Because of these unique properties, the use of V_{HH} domains and Nanobodies as single antigen-binding proteins or as antigen-binding domains (i.e. as part of a larger protein or polypeptide) offers a number of significant advantages over the use of conventional V_{H} and V_{L} domains, scFv□s or conventional antibody fragments (such a [symbol] [symbol] (ab□₂-fragments), including the advantages that are listed on pages 60 and 61 of WO 08/020,079. In a specific and preferred aspect, the invention provides Nanobodies against Integrins, and in particular Nanobodies against Integrins from a warm-blooded animal, and more in particular Nanobodies against Integrins from a mammal, and especially Nanobodies against human Integrins; as well as proteins and/or polypeptides comprising at least one such Nanobody.

[0266] In particular, the invention provides Nanobodies against Integrins, and proteins and/or polypeptides comprising the same, that have improved therapeutic and/or pharmacological properties and/or other advantageous properties (such as, for example, improved ease of preparation and/or reduced costs of goods), compared to conventional antibodies against Integrins or fragments thereof, compared to constructs that could be based on such conventional antibodies or antibody fragments (such as Fab□fragments, F₂(fragments), ScFv constructs, □diabodies□ and other multispecific constructs (see for example the review by Holliger and Hudson, Nat Biotechnol. 2005 Scp;23(9):1126-36)), and also compared to the so-called □ dAb□s□ or similar (single) domain antibodies that may be derived from varial domains of conventional antibodies. These improved and advantageous properties will become clear from the further description herein, and for example include, without limitation, one or more of:
[0267] increased affinity and/or avidity for Integrins, either in a monovalent format, in a multivalent format (for example in a bivalent format) and/or in a multispecific format (for example one of the multispecific formats described hereinbelow);
[0268] better suitability for formatting in a multivalent format (for example in a bivalent format);
[0269] better suitability for formatting in a multispecific format (for example one of the multispecific formats described hereinbelow);
[0270] improved suitability or susceptibility for □humanizing□substitutions (as defined herein);
[0271] less immunogenicity, either in a monovalent format, in a multivalent format (for example in a bivalent format) and/or in a multispecific format (for example one of the multispecific formats described hereinbelow);
[0272] increased stability, either in a monovalent format, in a multivalent format (for example in a bivalent format) and/or in a multispecific format (for example one of the multispecific formats described hereinbelow);
[0273] increased specificity towards Integrins, either in a monovalent format, in a multivalent format (for example in a bivalent format) and/or in a multispecific format (for example one of the multispecific formats described hereinbelow);
[0274] decreased or where desired increased cross-reactivity with Integrins from different species;
   and/or
[0275] one or more other improved properties desirable for pharmaceutical use (including prophylactic use and/or therapeutic use) and/or for diagnostic use (including but not limited to use for imaging purposes), either in a monovalent format, in a multivalent format (for example in a bivalent format) and/or in a multispecific format (for example one of the multispecific formats described hereinbelow).

[0276] As generally described herein for the amino acid sequences of the invention, the Nanobodies of the invention are preferably in essentially isolated form (as defined herein), or form part of a protein or polypeptide of the invention (as defined herein), which may comprise or essentially consist of one or more Nanobodies of the invention and which may optionally further comprise one or more further amino acid sequences (all optionally linked via one or more suitable linkers). For example, and without limitation, the one or more amino acid sequences of the invention may be used as a binding unit in such a protein or polypeptide, which may optionally contain one or more further amino acid sequences that can serve as a binding unit (i.e. against one or more other targets than Integrins), so as to provide a monovalent, multivalent or multispecific polypeptide of the invention, respectively, all as described herein. In particular, such a protein or polypeptide may comprise or essentially consist of one or more Nanobodies of the invention and optionally one or more (other) Nanobodies (i.e. directed against other targets than Integrins), all optionally linked via one or more suitable linkers, so as to provide a monovalent, multivalent or multispecific Nanobody construct, respectively, as further described herein. Such proteins or polypeptides may also be in essentially isolated form (as defined herein).

[0277] In a Nanobody of the invention, the binding site for binding against Integrins is preferably formed by the CDR sequences. Optionally, a Nanobody of the invention may also, and in addition to the at least one binding site for binding against Integrins, contain one or more further binding sites for binding against other antigens, proteins or targets. For methods and positions for introducing such second binding sites, reference is for example made to Keck and Huston, Biophysical Journal, 71, October 1996, 2002-2011; EP 0 640 130; and WO 06/07260.

[0278] As generally described herein for the amino acid sequences of the invention, when a Nanobody of the invention (or a polypeptide of the invention comprising the same) is intended for administration to a subject (for example for therapeutic and/or diagnostic purposes as described herein), it is preferably directed against human Integrins; whereas for veterinary purposes, it is preferably directed against Integrins from the species to be treated. Also, as with the amino acid sequences of the invention, a Nanobody of the invention may or may not be cross-reactive (i.e. directed against Integrins from two or more species of mammal, such as against human Integrins and Integrins from at least one of the species of mammal mentioned herein).

[0279] Also, again as generally described herein for the amino acid sequences of the invention, the Nanobodies of the invention may generally be directed against any antigenic determinant, epitope, part, domain, subunit or confirmation (where applicable) of Integrins.

[0280] As already described herein, the amino acid sequence and structure of a Nanobody can be considered—without however being limited thereto—to be comprised of four framework regions or □FR□s (or sometimes also referred to as□FW□s), w [symbol] [symbol] to in the art and herein as □Framework region□□ FR [symbol] [symbol] d□; as □Framework region 2□ [symbol] [symbol] □FR2□; as □Framework region 3□ or □FR3□; and as □ Framework region respectively; which framework regions are interrupted by three complementary determining regions or □CDR□s□, which are referred□ to in [symbol] Complementarity Determining Region 1□ or □CDR1□; as □Complementarity Determining Region 2□ or□ CD □Complementarity Determining Region 3□ or □CDR3□, respectively. Some preferred framework sequences and CDR s (and combinations thereof) that present in the Nanobodies of the invention are as described herein. Other suitable CDR sequences can be obtained by the methods described herein.

[0281] According to a non-limiting but preferred aspect of the invention, (the CDR sequences present in) the Nanobodies of the invention are such that:
[0282] the Nanobodies can bind to Integrins with a dissociation constant (Kₙ) of 10⁻⁵ to 10⁻¹² moles/liter or less, and preferably 10⁻⁷ to 10⁻¹² moles/liter or less and more preferably 10⁻⁸ to 10⁻¹² moles/liter (i.e. with an association constant (K_{A}) of 10⁵ to 10¹² liter/moles or more, and preferably 10⁷ to 10¹² liter/moles or more and more preferably 10⁸ to 10¹² liter/moles);
   and/or such that:
[0283] the Nanobodies can bind to Integrins with a kₒₙ-rate of between 10² M⁻¹s⁻¹ to about 10⁷ M⁻¹s⁻¹, preferably between 10³ M⁻¹s⁻¹ and 10⁷ M⁻¹s⁻¹, more preferably between 10⁴ M⁻¹s⁻¹ and 10⁷ M⁻¹s⁻¹, such as between 10⁻⁵ M⁻¹s⁻¹ and 10⁷ M⁻¹ s⁻¹;
   and/or such that they:
[0284] the Nanobodies can bind to Integrins with a k_{off} rate between (t_{1/2}=0.69 s) and 10⁻⁶ s⁻¹ (providing a near irreversible complex with a t_{1/2} of multiple days), preferably between 10⁻² s⁻¹ and 10⁻⁶ s⁻¹, more preferably between 10⁻³ s⁻¹ and 10⁻⁶ s⁻¹, such as between 10⁻⁴ s⁻¹ and 10⁻⁶ s⁻¹

[0285] Preferably, (the CDR sequences present in) the Nanobodies of the invention are such that: a monovalent Nanobody of the invention (or a polypeptide that contains only one Nanobody of the invention) is preferably such that it will bind to Integrins with an affinity less than 500 nM, preferably less than 200 nM, more preferably less than 10 nM, such as less than 500 pM.

[0286] The affinity of the Nanobody of the invention against Integrins can be determined in a manner known per se, for example using the general techniques for measuring Kᵣ). K_{A}, k_{off} or kₒₙ mentioned herein, as well as some of the specific assays described herein.

[0287] Some preferred IC50 values for binding of the Nanobodies of the invention (and of polypeptides comprising the same) to Integrins will become clear from the further description and examples herein.

[0288] In a preferred but non-limiting aspect, the invention relates to a Nanobody (as defined herein) against Integrins, which consists of 4 framework regions (FR1 to FR4 respectively) and 3 complementarity determining regions (CDR1 to CDR3 respectively), in which:
[0289] CDR1 is chosen from the group consisting of:
[0290] a) the amino acid sequences of SEQ ID NO□s: 296 to 465;
[0291] b) amino acid sequences that have at least 80% amino acid identity with at least one of the amino acid sequences of SEQ ID NO□s: 296 to 465;
[0292] c) amino acid sequences that have 3, 2, or 1 amino acid difference with at least one of the amino acid sequences of SEQ ID NO□s: 296 to 465;
   and/or
   [0293] CDR2 is chosen from the group consisting of:
[0294] d) the amino acid sequences of SEQ ID NO□s: 636 to 805;
[0295] e) amino acid sequences that have at least 80% amino acid identity with at least one of the amino acid sequences of SEQ ID NO□s: 636 to 805;
[0296] f) amino acid sequences that have 3, 2, or 1 amino acid difference with at least one of the amino acid sequences of SEQ ID NO□s: [symbol] ;
   and/or
   [0297] CDR3 is chosen from the group consisting of:
[0298] g) the amino acid sequences of SEQ ID NO□s: 976 to 1145;
[0299] h) amino acid sequences that have at least 80% amino acid identity with at least one of the amino acid sequences of SEQ ID NO□s: 976 to 1145;
[0300] i) amino acid sequences that have 3, 2, or 1 amino acid difference with at least one of the amino acid sequences of SEQ ID NO□s: 976 to 1145;
   or any suitable fragment of such an amino acid sequence.

[0301] In particular, according to this preferred but non-limiting aspect, the invention relates to a Nanobody (as defined herein) against Integrins, which consists of 4 framework regions (FR1 to FR4 respectively) and 3 complementarity determining regions (CDR1 to CDR3 respectively), in which:
[0302] CDR1 is chosen from the group consisting of:
[0303] a) the amino acid sequences of SEQ ID NO□s: 296 to 465;
[0304] b) amino acid sequences that have at least 80% amino acid identity with at least one of the amino acid sequences of SEQ ID NO□s: 296 to 465;
[0305] c) amino acid sequences that have 3, 2, or 1 amino acid difference with at least one of the amino acid sequences of SEQ ID NO□s: 296 to 465;
   and
   [0306] CDR2 is chosen from the group consisting of:
[0307] d) the amino acid sequences of SEQ ID NO□s: 636 to 805;
[0308] e) amino acid sequences that have at least 80% amino acid identity with at least one of the amino acid sequences of SEQ ID NO□s: 636 to 805;
[0309] f) amino acid sequences that have 3, 2, or 1 amino acid difference with at least one of the amino acid sequences of SEQ ID NO□s: 636 to 805;
   and
   [0310] CDR3 is chosen from the group consisting of:
[0311] g) the amino acid sequences of SEQ ID NO□s: 976 to 1145;
[0312] h) amino acid sequences that have at least 80% amino acid identity with at least one of the amino acid sequences of SEQ ID NO□s: 976 to 1145;
[0313] i) amino acid sequences that have 3, 2, or 1 amino acid difference with at least one of the amino acid sequences of SEQ ID NO□s: 976 to 1145;
   or any suitable fragment of such an amino acid sequences.

[0314] As generally mentioned herein for the amino acid sequences of the invention, when a Nanobody of the invention contains one or more CDR1 sequences according to b) and/or c):
[0315] i) any amino acid substitution in such a CDR according to b) and/or c) is preferably, and compared to the corresponding CDR according to a), a conservative amino acid substitution (as defined herein);
   and/or
[0316] ii) the CDR according to b) and/or c) preferably only contains amino acid substitutions, and no amino acid deletions or insertions, compared to the corresponding CDR according to a);
   and/or
[0317] iii) the CDR according to b) and/or c) may be a CDR that is derived from a CDR according to a) by means of affinity maturation using one or more techniques of affinity maturation known per se.

[0318] Similarly, when a Nanobody of the invention contains one or more CDR2 sequences according to e) and/or f):
[0319] i) any amino acid substitution in such a CDR according to e) and/or f) is preferably, and compared to the corresponding CDR according to d), a conservative amino acid substitution (as defined herein);
   and/or
[0320] ii) the CDR according to e) and/or f) preferably only contains amino acid substitutions, and no amino acid deletions or insertions, compared to the corresponding CDR according to d);
   and/or
[0321] iii) the CDR according to e) and/or f) may be a CDR that is derived from a CDR according to d) by means of affinity maturation using one or more techniques of affinity maturation known per se.

[0322] Also, similarly, when a Nanobody of the invention contains one or more CDR3 sequences according to h) and/or i):
[0323] i) any amino acid substitution in such a CDR according to h) and/or i) is preferably, and compared to the corresponding CDR according to g), a conservative amino acid substitution (as defined herein);
   and/or
[0324] ii) the CDR according to h) and/or i) preferably only contains amino acid substitutions, and no amino acid deletions or insertions, compared to the corresponding CDR according to g);
   and/or
[0325] iii) the CDR according to h) and/or i) may be a CDR that is derived from a CDR according to g) by means of affinity maturation using one or more techniques of affinity maturation known per se.

[0326] It should be understood that the last three paragraphs generally apply to any Nanobody of the invention that comprises one or more CDR1 sequences, CDR2 sequences and/or CDR3 sequences according to b), c), e), h) or i), respectively.

[0327] Of the Nanobodies of the invention, Nanobodies comprising one or more of the CDR□s explicitly listed above are particularly preferred; Nanobodies comprising two or more of the CDR□s explicitly listed above are more particularly preferred; and Nanobodies comprising three of the CDR□s explicitly listed above [symbol] particularly preferred. Some particularly preferred, but non-limiting combinations of CDR sequences, as well as preferred combinations of CDR sequences and framework sequences, are mentioned in Table A-1 below, which lists the CDR sequences and framework sequences that are present in a number of preferred (but non-limiting) Nanobodies of the invention. As will be clear to the skilled person, a combination of CDR1, CDR2 and CDR3 sequences that occur in the same clone (i.e. CDR1, CDR2 and CDR3 sequences that are mentioned on the same line in Table A-1) will usually be preferred (although the invention in its broadest sense is not limited thereto, and also comprises other suitable combinations of the CDR sequences mentioned in Table A-1). Also, a combination of CDR sequences and framework sequences that occur in the same clone (i.e. CDR sequences and framework sequences that are mentioned on the same line in Table A-1) will usually be preferred (although the invention in its broadest sense is not limited thereto, and also comprises other suitable combinations of the CDR sequences and framework sequences mentioned in Table A-1, as well as combinations of such CDR sequences and other suitable framework sequences, e.g. as further described herein). Also, in the Nanobodies of the invention that comprise the combinations of CDR□s mentioned in Table A-1, each CDR can be replaced by a CDR chosen from the group consisting of amino acid sequences that have at least 80%, preferably at least 90%, more preferably at least 95%, even more preferably at least 99% sequence identity (as defined herein) with the mentioned CDR□s; in which:
[0328] i) any amino acid substitution in such a CDR is preferably, and compared to the corresponding CDR sequence mentioned in Table A-1, a conservative amino acid substitution (as defined herein);
   and/or
[0329] ii) any such CDR sequence preferably only contains amino acid substitutions, and no amino acid deletions or insertions, compared to the corresponding CDR sequence mentioned in Table A-1;
   and/or
[0330] iii) any such CDR sequence is a CDR that is derived by means of a technique for affinity maturation known per se, and in particular starting from the corresponding CDR sequence mentioned in Table A-1.

[0331] However, as will be clear to the skilled person, the (combinations of) CDR sequences, as well as (the combinations of) CDR sequences and framework sequences mentioned in Table A-1 will generally be preferred.

TABLE A-1
Preferred combinations of CDR sequences, preferred combinations of framework sequences,
and preferred combinations of framework and CDR sequences.

| ID | FR1 | ID | CDR1 | ID | FR2 | ID | CDR2 | ID | FR3 | ID | CDR3 | ID | FR4 |
|---|---|---|---|---|---|---|---|---|---|---|---|---|---|
| 126 | EVQLVES | 296 | YYNIG | 466 | WFRQAPGE | 636 | CVSSSG | 806 | RFTISRDNAKNTV | 976 | LNLFTTCDGPWGYEY | 1146 | YGQGTQ |
| | GGGLVQP | | | | EREGVS | | GSTYYA | | YLQMNSLKPEDTA | | DY | | VTVSS |
| | GGSLRLS | | | | | | DSVKG | | VYYCAT | | | | |
| | CAASGFT | | | | | | | | | | | | |
| | LD | | | | | | | | | | | | |
| 127 | EVQLVES | 297 | YYNIG | 467 | WFRQAPGK | 637 | CVSSSG | 807 | RFTISRDNAKNTV | 977 | LNLFTTCDGPWGYEY | 1147 | YGQGTQ |
| | GGGLVQP | | | | EREGVS | | GSTYYA | | YLQMNSLKPEDTA | | DY | | VTVSS |
| | GGSLRLS | | | | | | DSVKG | | VYYCAT | | | | |
| | CAASGFT | | | | | | | | | | | | |
| | LD | | | | | | | | | | | | |
| 128 | XVQLVES | 298 | YYAIG | 468 | WFRQAPGK | 638 | CISSSDG | 808 | RFTISRDNAKNTV | 978 | LNLFTTCDGPWGYEY | 1148 | YGQGTQ |
| | GGGLVQP | | | | EREGVS | | STYYAD | | YLQMNSLKPEDTA | | DY | | VTVSS |
| | GGSLRLS | | | | | | SVKG | | VYYCAT | | | | |
| | CAASGFT | | | | | | | | | | | | |
| | LD | | | | | | | | | | | | |
| 129 | EVQLVES | 299 | YYNIG | 469 | WFRQAPGK | 639 | CVSDSG | 809 | RFTISRDNAKNTV | 979 | LNLFTTCDGPWGYEY | 1149 | YGQGTQ |
| | GGGLVQP | | | | EREGVS | | GSTYYA | | YLQMNSLKPEDTA | | DY | | VTVSS |
| | GGSLRLS | | | | | | DSVKG | | VYYCAT | | | | |
| | CAASGFT | | | | | | | | | | | | |
| | LD | | | | | | | | | | | | |
| 130 | EVQLVES | 300 | SYNIG | 470 | WFRQAPGE | 640 | CVSSSG | 810 | RFTISRDNAKNTV | 980 | LNLFTTCDGPWGYEY | 1150 | YGQGTQ |
| | GGGLVQP | | | | EREGVS | | GSTYYA | | YLQMNSLKPEDTA | | DY | | VTVSS |
| | GGSLRLS | | | | | | DSVKG | | VYYCAT | | | | |
| | CAASGFT | | | | | | | | | | | | |
| | LD | | | | | | | | | | | | |
| 131 | EVQLVES | 301 | DYAIG | 471 | WFRQAPGK | 641 | CISSSDG | 811 | RFTISSDNAKNTV | 981 | DPRFEPTLLCTDYDYE | 1151 | WGQGT |
| | GGGLVQA | | | | EREGVS | | STFYAD | | YLQMNSLKPEDTA | | DY | | QVTVSS |
| | GGSLRLS | | | | | | SVKG | | VYYCAA | | | | |
| | CAASGFT | | | | | | | | | | | | |
| | AD | | | | | | | | | | | | |
| 132 | EVQLVES | 302 | DYAIG | 472 | WFRQAPGK | 642 | CISSSDG | 812 | RFTVSSDNAKNTV | 982 | BPXLSPQTYCTDYDY | 1152 | WGQGT |
| | GGGLVQP | | | | EREGVS | | STFYAN | | YLQMNSLKPEDTA | | SY | | QVTVSS |
| | GGSLRLS | | | | | | SVKD | | VYYCAA | | | | |
| | CAASGFT | | | | | | | | | | | | |
| | FD | | | | | | | | | | | | |
| 133 | EVQLVES | 303 | DYAIG | 473 | WFRQAPGK | 643 | CISSSDG | 813 | RFTISSDDAKNTV | 983 | TPRRFGWCSDYBEYD | 1153 | WGQGT |
| | GGGLVQA | | | | EREGVS | | YTYYAD | | YLQMNSLKPEDTA | | Y | | QVTVSS |
| | GGSLRLS | | | | | | SVKD | | VYYCAA | | | | |
| | CAASGFT | | | | | | | | | | | | |
| | FD | | | | | | | | | | | | |
| 134 | EVQLVES | 304 | DYAIG | 474 | WFRQAPGK | 644 | CISSSDG | 814 | RFTISSDNAKNTV | 984 | TPRRFGWCSDYDEYD | 1154 | WGQGT |
| | GGGLVQA | | | | EREGVS | | YSFYAN | | YLQMNSLKPEDTA | | Y | | QVTVSS |
| | GGSLRLS | | | | | | SVKG | | VYYCAA | | | | |
| | CAASGFT | | | | | | | | | | | | |
| | FD | | | | | | | | | | | | |
| 135 | EVQLVES | 305 | DYAIG | 475 | WFRQAPGE | 645 | CISSSDG | 815 | RFTISSDNAKNTM | 985 | TPRRFGWXSDYDXYD | 1155 | WGQGT |
| | GGGLVXA | | | | EREGVS | | YTYYAH | | YLQMNSLKPEDTA | | Y | | QVTVSS |
| | GGSLRLS | | | | | | SVKD | | VYYCAA | | | | |
| | CAXSGFX | | | | | | | | | | | | |
| | FD | | | | | | | | | | | | |
| 136 | XVQLVES | 306 | DYVIG | 476 | WFXQAPGK | 646 | CISSSEG | 816 | RFTISXDNAKNTV | 986 | XRKIIGLWCSDYDNY | 1156 | WGQGT |
| | GGGLVQA | | | | EREGVS | | YTFYAD | | SLQMNSLKPEDTA | | DY | | QVTVSS |
| | GGSLRLS | | | | | | SVKD | | VYYCAA | | | | |
| | CAASGFT | | | | | | | | | | | | |
| | FD | | | | | | | | | | | | |
| 137 | EVQLVES | 307 | IASMG | 477 | WYRQAPGK | 647 | RIRSDGT | 817 | RFTIAKDNAKNAG | 987 | AGSTIDGGFSS | 1157 | WGPGTQ |
| | GGGLVRA | | | | QRTWVA | | TSYQDA | | YLQMDNLKPEDT | | | | VTVSS |
| | GGSLRLS | | | | | | VKG | | AVYYCNA | | | | |
| | CTASGNIL | | | | | | | | | | | | |
| | N | | | | | | | | | | | | |
| 138 | EVQLVES | 308 | IASMG | 478 | WYRQALGK | 648 | RIRSDGT | 818 | RFTIAKDNAKNAG | 988 | AGSTIDGGFSS | 1158 | WGPGTQ |
| | GGGLVRA | | | | QRTWVA | | TSYQDA | | YLQMDNLKPEDT | | | | VTVSS |
| | GGSLRLS | | | | | | VKG | | AVYYCNA | | | | |
| | CTASGNIL | | | | | | | | | | | | |
| | N | | | | | | | | | | | | |
| 139 | EVQLVES | 309 | IVNAG | 479 | WYRQGPEK | 649 | RITSGGT | 819 | RFTISRDNAKNTV | 989 | RVIAPGRLDDI | 1159 | WGQGT |
| | GGGLVQA | | | | QRELVA | | TNYAES | | YLQMNSLKPEDTA | | | | QVTVSS |
| | GGSLRLS | | | | | | VKG | | VYSCNA | | | | |
| | CAASGSG | | | | | | | | | | | | |
| | FN | | | | | | | | | | | | |
| 140 | EVxLVESG | 310 | IVNAG | 480 | WYRQGPGK | 650 | RITSGGT | 820 | RFTISRDNAKNTV | 990 | RVIAPGRLDDI | 1160 | WGQGT |
| | GGLVQAG | | | | QREFVA | | TNYAES | | YLQMNSLKPEDTA | | | | QVTVSS |
| | GSLRLSC | | | | | | VKG | | VYSCNA | | | | |
| | AASGSGF | | | | | | | | | | | | |
| | N | | | | | | | | | | | | |
| 141 | EVQLVES | 311 | SYAMS | 481 | WVRQAPGK | 651 | AINSGG | 821 | RFTISRDDAKNTL | 991 | PIYYSPNTYPPTSRYD | 1161 | RGQGTQ |
| | GGGLVQP | | | | GVEWVS | | GSTSYL | | YLQMNSLKPEDTA | | Y | | VTVSS |
| | GGSLRLS | | | | | | NSVKG | | VYYCAK | | | | |
| | CAASGFA | | | | | | | | | | | | |
| | FS | | | | | | | | | | | | |
| 142 | KVQLVES | 312 | SYVMT | 482 | WVRQAPGK | 652 | SITSGGG | 822 | RFTISRDDAKNTL | 992 | PTFYSPNMYPPTSRYD | 1162 | RGQGTQ |
| | GGGLVQP | | | | GLEWVS | | YTSYLN | | YLQMNSLKPEDTA | | Y | | VTVSS |
| | GGSLRLS | | | | | | SVKG | | VYYCAK | | | | |
| | CAASGFA | | | | | | | | | | | | |
| | FS | | | | | | | | | | | | |
| 143 | EVQLVES | 313 | SYVMT | 483 | WVRQAPGK | 653 | SITSGGG | 823 | RFTISRDDAKNTL | 993 | PTFYSPNMYPPTSRYD | 1163 | RGQGTQ |
| | GGGLVQP | | | | GLEWVS | | YTSYVN | | YLQMNSLKPEDTA | | Y | | VTVSS |
| | GGSLRLS | | | | | | SVKG | | VYYCAK | | | | |
| | CAASGFA | | | | | | | | | | | | |
| | FS | | | | | | | | | | | | |
| 144 | EVQLVES | 314 | AYAIG | 484 | WFRQAPGK | 654 | CISSSDG | 824 | RFTISSDNAKNTV | 994 | DRRGKSEMYCTDYSY | 1164 | WGQGT |
| | GGGLVQA | | | | EREGVS | | STFYAD | | YLQMNSLKPEDTA | | SDA | | QVTVSS |
| | GGSLRLS | | | | | | SVKD | | VYYCAA | | | | |
| | CAASGFT | | | | | | | | | | | | |
| | LD | | | | | | | | | | | | |
| 145 | EVXLVESG | 315 | AYAIG | 485 | WFRQAPGK | 655 | CISSSDG | 825 | RFTISSDNAKNTV | 995 | DRRGKSEMYCTDYA | 1165 | WGQGT |
| | GGLVQAG | | | | EREGVS | | SRFYAD | | YLQMNSLKPEDTA | | YSDA | | QVTVSS |
| | GSLRLSC | | | | | | SVKD | | VYYCAA | | | | |
| | AASGFTL | | | | | | | | | | | | |
| | D | | | | | | | | | | | | |
| 146 | EVQLVES | 316 | IANSA | 486 | WYRQAPGN | 656 | RITSNDN | 826 | RLTISKDNAKNTA | 996 | RTVGTGSLFDY | 1166 | WGQGT |
| | GGGLVQA | | | | QRELVA | | TYYADS | | SLQMNSLKPEDTA | | | | QVTVSS |
| | GGSLTLSC | | | | | | VKG | | VYYCFV | | | | |
| | ALSGGSSS | | | | | | | | | | | | |
| 147 | EVQLVES | 317 | IANSA | 487 | WYRQAPGN | 657 | RITSNDN | 827 | RFTISKDNAKNTA | 997 | RTVGTGSLFDY | 1167 | WGQGT |
| | GGGLVQA | | | | QRELVA | | TYYADS | | SLQMNSLKPEDTA | | | | QVTVSS |
| | GGSLTLSC | | | | | | VKG | | VYYCFV | | | | |
| | ALSGGSSS | | | | | | | | | | | | |
| 148 | EVQPVES | 318 | IANSA | 488 | WYRQAPGN | 658 | RITSNDN | 828 | RFTISKDNAKNTA | 998 | RTVGTGSLFDY | 1168 | WGQGT |
| | GGGLVQA | | | | QRELVA | | TYYADS | | SLQMNSLKPEDTA | | | | QVTVSS |
| | GGSLTLSC | | | | | | VKG | | VYYCFV | | | | |
| | ALSGGSSS | | | | | | | | | | | | |
| 149 | EVQLVES | 319 | DYAIG | 489 | WFRQAPGK | 659 | CISSSHG | 829 | RFTISSDNAKNTV | 999 | ALGGGSSWCTTYEYD | 1169 | WGQGT |
| | GGGLVQA | | | | EREGVS | | STFYAD | | YLQMNSLKPEDTA | | A | | QVTVSS |
| | GGSLRLS | | | | | | SVKD | | VYYCAA | | | | |
| | CAASGFT | | | | | | | | | | | | |
| | FD | | | | | | | | | | | | |
| 150 | EVQLVES | 320 | ISDMR | 490 | WYRQAPGN | 660 | SISRGGS | 830 | RFTISRDNAKNTV | 1000 | AVAAGTVGAYTLRN | 1170 | WGQGT |
| | GGGLVQS | | | | QRELAA | | TNYGDF | | SLQMSSLEPEDTA | | Y | | QVTVSS |
| | GGSLRLS | | | | | | VKG | | VYYCNA | | | | |
| | CAASGSIV | | | | | | | | | | | | |
| | G | | | | | | | | | | | | |
| 151 | KVQLVES | 321 | VSTMT | 491 | WYRQVLGT | 661 | SITRSGG | 831 | RFTIARDNAKNTM | 1001 | VIASNSGRSYDLRNY | 1171 | WGQGT |
| | GGGLVQA | | | | QRELVA | | SNYADP | | YLQMNSLKPEDTA | | | | QVTVSS |
| | GGSLRLT | | | | | | VKG | | IYYCNA | | | | |
| | CAASGSIL | | | | | | | | | | | | |
| | S | | | | | | | | | | | | |
| 152 | EVQLVES | 322 | IGNMG | 492 | WYRQAPGK | 662 | TITQAGS | 832 | RFTISRDVPKNTVS | 1002 | NIVTYDRGRTTVKNY | 1172 | WGQGT |
| | GGGLVQP | | | | QRELVA | | PNYSQS | | LQMNSLKPEDTAV | | | | QVTVSS |
| | GGSLRLS | | | | | | AKG | | YYCNG | | | | |
| | CTASGSV | | | | | | | | | | | | |
| | FS | | | | | | | | | | | | |
| 153 | EVQLVES | 323 | FIEMG | 493 | WYRQAPGK | 663 | HITSGGS | 833 | RFTISRDLSLQMN | 1003 | KGTDRRSY | 1173 | WGQGT |
| | GGGLVQP | | | | QRELVA | | TKYADS | | NLNPEDSAVYLCN | | | | QVTVSS |
| | GGSLRLY | | | | | | VKG | | M | | | | |
| | CAAPGTM | | | | | | | | | | | | |
| | YS | | | | | | | | | | | | |
| 154 | XVQLVES | 324 | DYAIG | 494 | WFRQAPGK | 664 | CISRSAG | 834 | RFTISSDNAKNTVS | 1004 | YRAIGHFCTDYXDFV | 1174 | WGQGT |
| | GGGLVQA | | | | EREGVS | | SKYYAD | | LQMNSLKPEDTAV | | S | | QVTVSS |
| | GGSLRLS | | | | | | SVKD | | YYCAA | | | | |
| | CAASGFT | | | | | | | | | | | | |
| | FD | | | | | | | | | | | | |
| 155 | EVQLVES | 325 | INAMG | 495 | WYRQAPGK | 665 | IIYSSGRI | 835 | RFTISRDNAKNTV | 1005 | ANPNTGWQRPHRAS | 1175 | WGQGT |
| | GGGLVQA | | | | QRELVA | | DYADSV | | YLQMNNLQPDDT | | | | QVTVSS |
| | GGSLRLS | | | | | | KG | | AAYYCNA | | | | |
| | CTVSGST | | | | | | | | | | | | |
| | GS | | | | | | | | | | | | |
| 156 | EVQLVES | 326 | INAMG | 496 | WYRQAPGK | 666 | IIYSSGTI | 836 | RFTISRDNAKNTV | 1006 | ANPNTGWQRPHRAS | 1176 | WGQGT |
| | GGGVVQA | | | | QRELVA | | BYADSV | | YLQMNSLKPDDT | | | | QVTVSS |
| | GGSLRLS | | | | | | KG | | AAYYCNA | | | | |
| | CTVSGST | | | | | | | | | | | | |
| | GS | | | | | | | | | | | | |
| 157 | EVQLVES | 327 | INAMG | 497 | WYRQAPGK | 667 | IIYSSGRI | 837 | RFTISRDNAKNTV | 1007 | ANPNTGWQRPHRAS | 1177 | WGQGT |
| | GRGLVQA | | | | QRELVA | | DYADSV | | BLQMNSLKPDDTA | | | | QVTVSS |
| | GGSLRLS | | | | | | KG | | AYYCNA | | | | |
| | CTVSGST | | | | | | | | | | | | |
| | GS | | | | | | | | | | | | |
| 158 | EVQLVES | 328 | INVMG | 498 | WYRQAPGK | 668 | IIYSSGT | 838 | RFTISRDNAKNTV | 1008 | AMQDSAWLRPHRAS | 1178 | WGQGT |
| | GGGLVQA | | | | QRELVA | | LDYADS | | YLQMNSLKPDDT | | | | QVTVSS |
| | GGSLRLS | | | | | | VKG | | AAYYCNA | | | | |
| | CTVSGST | | | | | | | | | | | | |
| | GS | | | | | | | | | | | | |
| 159 | EVQLVES | 329 | INAMG | 499 | WYRQAPGR | 669 | IIYSSGRI | 839 | RFTISRDNAKNTV | 1009 | ANPNTGWQRPHRAS | 1179 | WGQGT |
| | GGGLVQA | | | | *RELVA | | DYADSV | | DLQMNSLKPDDT | | | | QVTVSS |
| | GGSLRLS | | | | | | KG | | AAYYCNA | | | | |
| | CTVSGST | | | | | | | | | | | | |
| | GS | | | | | | | | | | | | |
| 160 | EVQLVES | 330 | INAMG | 500 | WYRQAPGK | 670 | IIYSSGRI | 840 | RFTISRDNAKNTV | 1010 | ANPNTGWQRPHRAS | 1180 | WGQGT |
| | GGGLVQA | | | | QRELVA | | DYADSV | | YLQMNNLQPDDT | | | | QVTVSS |
| | GGSLRLS | | | | | | KG | | AAYYCNA | | | | |
| | CTVSGST | | | | | | | | | | | | |
| | GS | | | | | | | | | | | | |
| 161 | EVQLVES | 331 | INVMG | 501 | WYRQAPGK | 671 | TISSSGY | 841 | RFTISRDNKNTVH | 1011 | STLRTGWFTG | 1181 | WGQGT |
| | GGELVQA | | | | QRELVA | | TDYSDS | | LQMNSLKPEDTAV | | | | QVTVSS |
| | GGSLRLS | | | | | | AKG | | YYCRA | | | | |
| | CAASGSV | | | | | | | | | | | | |
| | SS | | | | | | | | | | | | |
| 162 | EMQLVES | 332 | INVMG | 502 | WYRQAPGK | 672 | TISSSGY | 842 | RFTISRDNKNTVH | 1012 | STLRTGWFTG | 1182 | WGQGT |
| | GGELVQA | | | | QRELVA | | TDYSDS | | LQMNSLKPEDTAV | | | | QVTVSS |
| | GGSLRLS | | | | | | AKG | | YYCRA | | | | |
| | CAASGSV | | | | | | | | | | | | |
| | SS | | | | | | | | | | | | |
| 163 | EVQLVES | 333 | INVMG | 503 | WYRQAPGK | 673 | TISSSGC | 843 | RFTISRDNKNTVH | 1013 | STLRTGWFTG | 1183 | WGQGT |
| | GGELVQA | | | | QRELVA | | TDYSDS | | LQMNSLKPEDTAV | | | | QVTVSS |
| | GGSLRLS | | | | | | AKG | | YYCRA | | | | |
| | CAASGSV | | | | | | | | | | | | |
| | SS | | | | | | | | | | | | |
| 164 | AEVQLVE | 334 | INVMG | 504 | WYRQAPGK | 674 | TISSSGY | 844 | RFTISRDNKNTVH | 1014 | STLRTGWFTG | 1184 | WGQGT |
| | SGGELVQ | | | | QRELVA | | TDYADS | | LQMNSLKPEDTAV | | | | QVTVSS |
| | AGGSLRL | | | | | | AKG | | YYCRA | | | | |
| | SCAAPGS | | | | | | | | | | | | |
| | VSS | | | | | | | | | | | | |
| 165 | EVQLVES | 335 | INVMA | 505 | WYRQAPGK | 675 | TISSSGY | 845 | RFTISRDDXNTVH | 1015 | STARTGWLRA | 1185 | WGQGT |
| | GGGLVQA | | | | QRELVA | | TDYSDS | | LQMNSLKPEDTAV | | | | QVTVSS |
| | GRSLRLSC | | | | | | AKG | | YYCRA | | | | |
| | AASGSVS | | | | | | | | | | | | |
| | S | | | | | | | | | | | | |
| 166 | EVQLVES | 336 | INVMG | 506 | WYRQAPGK | 676 | TISSSGY | 846 | RFTISRDNENTVHL | 1016 | STARTGWLXP | 1186 | WGQGT |
| | GGGLVQA | | | | QRELVA | | TDYSDS | | QMNSLKPEDTGV | | | | QVTVSS |
| | GGSLRLS | | | | | | AKG | | YYCRA | | | | |
| | CAASGSV | | | | | | | | | | | | |
| | SS | | | | | | | | | | | | |
| 167 | EVQLVES | 337 | INVMA | 507 | WYRQAPGK | 677 | TISTTGY | 847 | RFTISRDSKNTVHL | 1017 | STLRTGWLMG | 1187 | WGQGT |
| | GGGLVQA | | | | ERELVA | | TDYSXS | | QMNSLKPEDTAV | | | | QVTVSS |
| | GGSLRLS | | | | | | AKG | | YYCRA | | | | |
| | CAASGSV | | | | | | | | | | | | |
| | SS | | | | | | | | | | | | |
| 168 | XVQLVES | 338 | INVMG | 508 | WYRQAPGK | 678 | TISTTGY | 848 | RFTISRDNKNTVH | 1018 | STLRTGWLKG | 1188 | WGQGT |
| | GGGLVQA | | | | QRELVA | | TDYSXS | | LQMNSLKPEDTAV | | | | QVTVSS |
| | GGSLRLS | | | | | | AKG | | YYCRA | | | | |
| | CAAXGSV | | | | | | | | | | | | |
| | SS | | | | | | | | | | | | |
| 169 | EVQLVES | 339 | INVMA | 509 | WYRQAPGK | 679 | TISSTGY | 849 | RFTISRDNKNTVH | 1019 | STLRTGWFMG | 1189 | WGQGT |
| | GGGLVQA | | | | QRELVA | | TDYSDS | | LQMNSLKPEDTAV | | | | QVTVSS |
| | GGSLRLS | | | | | | AKG | | YYCRA | | | | |
| | CAASGSV | | | | | | | | | | | | |
| | SS | | | | | | | | | | | | |
| 170 | EVQLVES | 340 | INVMA | 510 | WYRQAPGK | 680 | TISTSGY | 850 | RFTISRDNKNTVH | 1020 | STLRTGWLMG | 1190 | WGQGT |
| | GGGLVQA | | | | QRELVA | | TDYSDS | | LQMNSLKPEDTAV | | | | QVTVSS |
| | GGSLRLS | | | | | | AKG | | YYCRA | | | | |
| | CATSGSV | | | | | | | | | | | | |
| | SS | | | | | | | | | | | | |
| 171 | EVQLVES | 341 | INVMA | 511 | WYRQAPGK | 681 | TISTSGY | 851 | RFTISRDNKNTVH | 1021 | STLRTGWLMG | 1191 | WGQGT |
| | GGGLVQA | | | | QRELVA | | TDYSDS | | LQMNSLKPEDTAV | | | | QVTVSS |
| | GGSLRLS | | | | | | AKG | | YYCRA | | | | |
| | CAASGSV | | | | | | | | | | | | |
| | SS | | | | | | | | | | | | |
| 172 | EVQLVES | 342 | INVMA | 512 | WYRQAPGK | 682 | TISSTGY | 852 | RFTISRDNKNTVY | 1022 | STLRTGWLMG | 1192 | WGQGT |
| | GGGLVQA | | | | QRELVA | | TDYSDS | | LQMNSLKPEDTAI | | | | QVTVSS |
| | GGSLRLS | | | | | | AKG | | YYCRA | | | | |
| | CAASGSV | | | | | | | | | | | | |
| | SA | | | | | | | | | | | | |
| 173 | EVxLVESG | 343 | INLMG | 513 | WYRQAPGK | 683 | TISSTAY | 853 | RFTISRDNKNTVH | 1023 | STLRTGWLPG | 1193 | WGQGT |
| | GGLVQAG | | | | QRELVA | | TDYSDS | | LQMNSLKPEDTAV | | | | QVTVSS |
| | GSLRLSC | | | | | | AKG | | YYCRA | | | | |
| | AASGSISS | | | | | | | | | | | | |
| 174 | EV*LVESG | 344 | INVMA | 514 | WYRQAPGK | 684 | TISSSGY | 854 | RFTISRDDENTVHL | 1024 | STARTGWLRA | 1194 | WGQGT |
| | GGLVQAG | | | | QRELVA | | TDYSDS | | QMNSLKPEDTAV | | | | QVTVSS |
| | RSLRLSCA | | | | | | AKG | | YYCRA | | | | |
| | ASGSVSS | | | | | | | | | | | | |
| 175 | XVQLVES | 345 | INVMA | 515 | WYRQAPGK | 685 | TVSTTG | 855 | RFTISRDNKNTVY | 1025 | STLRTGWLMG | 1195 | WGQGT |
| | GGGLVQA | | | | QRELVA | | YTDYSD | | LQMNSLKPEDTAI | | | | QVTVSS |
| | GGSLRLS | | | | | | SAKG | | YYCRA | | | | |
| | CAASGSV | | | | | | | | | | | | |
| | SA | | | | | | | | | | | | |
| 176 | EVQLVES | 346 | FELMG | 516 | WYRQAPGK | 686 | LITSSGS | 856 | RFTISRDVAKNTL | 1026 | HTYTDNL | 1196 | WGQGT |
| | GGGLVQA | | | | PRDLVA | | TNYADS | | YLQMNSLKPEDTG | | | | QVTVSS |
| | GGSLRLS | | | | | | VKG | | VYYCNA | | | | |
| | CAASGSR | | | | | | | | | | | | |
| | FR | | | | | | | | | | | | |
| 177 | EVQLVES | 347 | FELMG | 517 | WYRQAPGK | 687 | LITSSGS | 857 | RFTISRDNAKNTL | 1027 | HTYTDNL | 1197 | WGQGT |
| | GGGLVQA | | | | PRDLVA | | ANYADS | | YLQMNSLKPEDTG | | | | QVTVSS |
| | GGSLRLS | | | | | | VKG | | VYYCNA | | | | |
| | CAASGSR | | | | | | | | | | | | |
| | LR | | | | | | | | | | | | |
| 178 | XVQLVES | 348 | FELMG | 518 | WYRQAPGK | 688 | LITSSGS | 858 | RFTISRDNAKNTL | 1028 | HTYTDNL | 1198 | WGQGT |
| | GGGLVQA | | | | PRDLVA | | ANYADS | | YLQMNSLKPEDTG | | | | QVTVSS |
| | GGSLRLS | | | | | | VKG | | VYYCNA | | | | |
| | CAASGSR | | | | | | | | | | | | |
| | LR | | | | | | | | | | | | |
| 179 | EVQLVES | 349 | FEIMG | 519 | WYRQAPGK | 689 | LITRSGS | 859 | RFTISRDSAKNTLY | 1029 | HTYTDNL | 1199 | WGQGT |
| | GGGVVEA | | | | PRDLVA | | ANYADS | | LQMNSLKPEDTGV | | | | QVTVSS |
| | GGSLRLS | | | | | | VKG | | YYCNA | | | | |
| | CAATGSR | | | | | | | | | | | | |
| | FR | | | | | | | | | | | | |
| 180 | EVQLVES | 350 | FEIMG | 520 | WYRQAPGK | 690 | LITSSGS | 860 | RFTISRDNAKNTL | 1030 | HTYTDNL | 1200 | WGQGT |
| | GGGLVQA | | | | PRDLVA | | ANYADS | | YLQMNSLKSEDTG | | | | QVTVSS |
| | GGSLRLS | | | | | | VKG | | VYYCNA | | | | |
| | CAASGSR | | | | | | | | | | | | |
| | LAASG | | | | | | | | | | | | |
| | FR | | | | | | | | | | | | |
| 181 | EMQLVES | 351 | FELMG | 521 | WYRQAPGK | 691 | LITSSGS | 861 | RFTISRDNAKNTL | 1031 | HTYTDNL | 1201 | WGQGT |
| | GGGLVQA | | | | PRDLVA | | ANYADS | | YLQMNSLKPEDTG | | | | QVTVSS |
| | GGSLRLS | | | | | | VKG | | VYYCNA | | | | |
| | CAASGSR | | | | | | | | | | | | |
| | LR | | | | | | | | | | | | |
| 182 | XVQLVES | 352 | FEIMG | 522 | WYRQAPGK | 692 | LITNSGS | 862 | RFTISRDNAKNTL | 1032 | HTYTDSL | 1202 | WGQGT |
| | GGGLVQA | | | | PRDLVA | | ANYABS | | YLQMNSLKPEDTG | | | | QVTVSS |
| | GGSLRLS | | | | | | VKG | | VYYCNA | | | | |
| | CAASGSR | | | | | | | | | | | | |
| | FR | | | | | | | | | | | | |
| 183 | KVQLVES | 353 | FELMG | 523 | WYRQAPGK | 693 | LITSSGS | 863 | RFTISRDNAKNTL | 1033 | HTYTDNL | 1203 | WGQGT |
| | GGGLVQA | | | | PRDLVA | | ANYAES | | YLQMNSLKPEDTG | | | | QVTVSS |
| | GGSLRLS | | | | | | VKG | | VYYCNA | | | | |
| | CAASGSR | | | | | | | | | | | | |
| | FR | | | | | | | | | | | | |
| 184 | EVQLVES | 354 | FELMG | 524 | WYRQAPGK | 694 | LITSSGS | 864 | RFTISRDNAKNTL | 1034 | HTYTDNL | 1204 | WGQGT |
| | GGGLVQA | | | | PRDLVA | | ANYADS | | YLQMNSLKPEDTG | | | | QVTVSS |
| | GGSLRLS | | | | | | VKG | | VYYCNA | | | | |
| | CAASGSR | | | | | | | | | | | | |
| | FR | | | | | | | | | | | | |
| 185 | EVQLVES | 355 | FELMG | 525 | WYRQAPGK | 695 | LITSSGS | 865 | RFTISRDNAKNTL | 1035 | HTYTDNL | 1205 | WGQGT |
| | GGGLVQV | | | | PRDLVA | | ANYADS | | YLQMNSLKPEDTG | | | | QVTVSS |
| | GGSLRLS | | | | | | VKG | | VYYCNA | | | | |
| | CAASGSR | | | | | | | | | | | | |
| | FR | | | | | | | | | | | | |
| 186 | EVQLVES | 356 | FELMG | 526 | WYRQAPGK | 696 | LITSSGS | 866 | RFTISRDNAKNTL | 1036 | HTYTDNL | 1206 | WGQGT |
| | GGGLVQA | | | | PRDLVA | | ANYADS | | YLQMNSLEPEDTG | | | | QVTVSS |
| | GGSLRLS | | | | | | VKG | | VYYCNA | | | | |
| | CAASGSR | | | | | | | | | | | | |
| | LR | | | | | | | | | | | | |
| 187 | EVQLVES | 357 | FELMG | 527 | WYRQAPGK | 697 | LITSSGS | 867 | RFTISRDNAKNTL | 1037 | HTYTDNL | 1207 | WGQGT |
| | RGGLVQA | | | | PRDLVA | | ANYADS | | YLQMNSLKPEDTG | | | | QVTVSS |
| | GGSLRLS | | | | | | VKG | | VYYCNA | | | | |
| | CAASGSR | | | | | | | | | | | | |
| | LR | | | | | | | | | | | | |
| 188 | EVQLVES | 358 | FELMG | 528 | WYRQAPGK | 698 | LITRSGS | 868 | RFTISRDNAKNTL | 1038 | HTYTDNL | 1208 | WGQGT |
| | GGGLVQA | | | | PRDLVA | | ANYADS | | YLQMNSLKPEDTG | | | | QVTVSS |
| | GGSLRLS | | | | | | VKG | | VYYCNA | | | | |
| | CAASGSR | | | | | | | | | | | | |
| | FR | | | | | | | | | | | | |
| 189 | EVQLVES | 359 | FEIMG | 529 | WYRQAPGS | 699 | LITNSGS | 869 | RFTISRDNAKNTF | 1039 | HTYTDNL | 1209 | WGQGT |
| | GGGLVRA | | | | ARDLVA | | ANYADS | | YLQMNSLKPEDTG | | | | QVTVSS |
| | GGSLRLS | | | | | | VKG | | VYYCNA | | | | |
| | CAASGSR | | | | | | | | | | | | |
| | FR | | | | | | | | | | | | |
| 190 | EVQLVES | 360 | FELMG | 530 | WYRXAPGK | 700 | LITXSGS | 870 | RFTISRXNAXNTL | 1040 | HTYTDNL | 1210 | WGQGT |
| | GGXLVQA | | | | PRDLVA | | ANYADS | | YLQMNSLKPEDTG | | | | QVTVSS |
| | EGSLRLSX | | | | | | VKG | | VYYCNX | | | | |
| | AASGSRF | | | | | | | | | | | | |
| | R | | | | | | | | | | | | |
| 191 | EVQLVES | 361 | FEIMG | 531 | WYRQAPGR | 701 | LITSSGS | 871 | RFTISRDNAKNTL | 1041 | HTYTDNL | 1211 | WGQGT |
| | GGGLVQA | | | | MRDLVA | | TNYADS | | YLQMNSLKPEDTG | | | | QVTVSS |
| | GGSLRLS | | | | | | VKG | | VYYCNA | | | | |
| | CAASGSR | | | | | | | | | | | | |
| | FR | | | | | | | | | | | | |
| 192 | EVQLVES | 362 | FVLMG | 532 | WYRQAPGK | 702 | QITSSDA | 872 | RFTISRDNAKKTV | 1042 | ARGPDVY | 1212 | WGQGT |
| | GGGLVQA | | | | QRELVA | | TNYADS | | DLQMNSLKPEDTA | | | | QVTVSS |
| | GGSVRLS | | | | | | VKG | | VYYCLL | | | | |
| | CAASGVIF | | | | | | | | | | | | |
| | R | | | | | | | | | | | | |
| 193 | KV*LVES | 363 | FVLMG | 533 | WYRXAPGK | 703 | QITSSDA | 873 | RFTISRDNAKKTV | 1043 | ARGPDVY | 1213 | WGQGT |
| | GGGLVQA | | | | QRELVA | | TNYADS | | DLQMNSLKPEDTA | | | | QVTVSS |
| | GGSVRLS | | | | | | VKG | | VYYCLL | | | | |
| | CAASGVIF | | | | | | | | | | | | |
| | R | | | | | | | | | | | | |
| 194 | EVQLVES | 364 | IYTMG | 534 | WYRQALGK | 704 | SISRDGS | 874 | RFTISRDNAKNTA | 1044 | EGWYQGY | 1214 | WGQGT |
| | GGGLVQA | | | | KRVFVA | | TIYGDS | | YLQMNSLKPEDTA | | | | QVTVSS |
| | GGSQKLS | | | | | | VKG | | VYVCKA | | | | |
| | CAASGST | | | | | | | | | | | | |
| | L | | | | | | | | | | | | |
| 195 | EVQLVES | 365 | IYTMG | 535 | WYRQAPGK | 705 | SISRDGS | 875 | RFTISRDSAKNTA | 1045 | XGWYNGY | 1215 | WGQGT |
| | GGGLVQA | | | | QRVFVA | | TIYGDS | | YLQMNRLKPEDT | | | | QVTVSS |
| | GGSLRLS | | | | | | VKG | | AVYVCKA | | | | |
| | CAASGST | | | | | | | | | | | | |
| | E | | | | | | | | | | | | |
| 196 | EVQLVES | 366 | IYTMG | 536 | WYRQALGK | 706 | SISRDGS | 876 | RFTISRDNAKNTA | 1046 | EGWYQGY | 1216 | WGQGT |
| | GGGLVQA | | | | KRVFVA | | TIYGDS | | YLQMNNLKPEDT | | | | QVTVSS |
| | GGSQKLS | | | | | | VKG | | AVYVCKA | | | | |
| | CAASGST | | | | | | | | | | | | |
| | L | | | | | | | | | | | | |
| 197 | EVQLVES | 367 | INAVG | 537 | WYRQAPEK | 707 | IILSSGTT | 877 | RFTISRDNAKNIVY | 1047 | ADREMGWAY | 1217 | WGQGT |
| | GGGLVQA | | | | QRELVA | | DYADSV | | LQMNSLKPEDTAV | | | | QVTVSS |
| | GGSLRLS | | | | | | KG | | YYCRV | | | | |
| | CAASGNT | | | | | | | | | | | | |
| | FS | | | | | | | | | | | | |
| 198 | EVQLVES | 368 | INAVG | 538 | WYRQAPEK | 708 | IIXSXGT | 878 | RFTISRDNAKNTV | 1048 | XDRXMGXAY | 1218 | WGQGT |
| | GGGLVQA | | | | QRELVA | | TDYADS | | YLQMNSLKPEDTA | | | | QVTVSS |
| | GGSLRLS | | | | | | VKG | | VYYCXX | | | | |
| | CAASGNT | | | | | | | | | | | | |
| | FS | | | | | | | | | | | | |
| 199 | EVQLVES | 369 | ILAMG | 539 | WYRQAPGK | 709 | TIIRDGK | 879 | RFTISRDNAKNTA | 1049 | KVIVMGAGMDDNDF | 1219 | FGQGTQ |
| | GGGLVQT | | | | QRELVT | | TYYSDS | | YLQMNSLKPEDTA | | | | VTVSS |
| | GGSLRLS | | | | | | VKD | | VYYCYT | | | | |
| | CAASGSIF | | | | | | | | | | | | |
| | M | | | | | | | | | | | | |
| 200 | EVQLVES | 370 | RTDVD | 540 | WYRQAPGK | 710 | IIAPFGT | 880 | RFTISRDNAKNIVY | 1050 | YWGGNVY | 1220 | WGQGT |
| | GGGLVQP | | | | GREWVA | | TNSRDS | | LQMNSLEPEDTAV | | | | QVTVSS |
| | GGSLRLS | | | | | | | | YYCRI | | | | |
| | CAASGSIL | | | | | | | | | | | | |
| | S | | | | | | | | | | | | |
| 201 | EVQLVES | 371 | IVHIQ | 541 | WHRQAPGK | 711 | SVNSRG | 881 | RAIISRDNAKNTV | 1051 | RTLQLGALRDY | 1221 | WGQGT |
| | GGGLVQA | | | | QRELVA | | TTNYAD | | YLQMNSLKPEDTA | | | | QVTVSS |
| | GGSLRLS | | | | | | SVKG | | VYYCYA | | | | |
| | CAPSSSAV | | | | | | | | | | | | |
| | S | | | | | | | | | | | | |
| 202 | EVQLVES | 372 | INTMD | 542 | WFRRTPGK | 712 | TITRDGR | 882 | RFTLSRDNTKNTV | 1052 | NVETTRGLTKNY | 1222 | WGQGIQ |
| | GGGLVQA | | | | QRELVS | | TTYADS | | SLQMNSLKPEDTA | | | | VTVSS |
| | GGSLRLS | | | | | | VKG | | VYYCLA | | | | |
| | CAASASIL | | | | | | | | | | | | |
| | S | | | | | | | | | | | | |
| 203 | EVQLVES | 373 | INAWG | 543 | WYRQAPGK | 713 | VISSSGS | 883 | RFTISTVNAGNTV | 1053 | ADSGPWRY | 1223 | WGQGS |
| | GGGLVQT | | | | QRELVA | | TDYSDA | | YLEMNSLKPEDTA | | | | QVTVSS |
| | GGSLRLS | | | | | | VKD | | VYYCAR | | | | |
| | CAASGST | | | | | | | | | | | | |
| | FN | | | | | | | | | | | | |
| 204 | EVQLVES | 374 | FSSVA | 544 | WYRQAPGK | 714 | QITHEGT | 884 | RFTISREFTLSRDG | 1054 | VQFGRNY | 1224 | WGQGT |
| | GGGKVQA | | | | QRELVA | | RNYADS | | PKEMVHLQMVSL | | | | QVTVSS |
| | GMSQRLS | | | | | | VKG | | | | | | |
| | CAASGGI | | | | | | | | | | | | |
| | GT | | | | | | | | | | | | |
| 205 | EVQLVES | 375 | INYMG | 545 | WYRQAPGK | 715 | IIDRVGA | 885 | RFTISRSNAKNEN | 1055 | VPTTSAY | 1225 | WGPGTQ |
| | GGGLVQA | | | | QREAVA | | STNYVD | | MLYLQMNSLKPE | | | | VTVSS |
| | GGSLRLS | | | | | | SVRG | | DTAVYYCNT | | | | |
| | CAASGSIF | | | | | | | | | | | | |
| | S | | | | | | | | | | | | |
| 206 | XVQLVES | 376 | SNYMG | 546 | WYRQAPGL | 716 | IIDRGGA | 886 | RFTISRSNAKNQS | 1056 | VPTTSAY | 1226 | WGPGTQ |
| | GGGLVQA | | | | QRESVA | | STNYVX | | MLYLQMNSLKPE | | | | VTVSS |
| | GGSLRLS | | | | | | SVRG | | DTAVYYCNT | | | | |
| | CAATGTIF | | | | | | | | | | | | |
| | S | | | | | | | | | | | | |
| 207 | EVQLVES | 377 | ISYMG | 547 | WYRQAPGK | 717 | IIDRSGA | 887 | RFTISRSNAKNKN | 1057 | VPTTSAY | 1227 | WGPGTQ |
| | GGGLVQA | | | | ERESVA | | STNYVD | | MLYLQMNSLKPE | | | | VTVSS |
| | GGSLRLS | | | | | | SVRG | | DTAVYYCNT | | | | |
| | CAASGSIF | | | | | | | | | | | | |
| | S | | | | | | | | | | | | |
| 208 | EVQLVES | 378 | IHTMG | 548 | WYRQAPGK | 718 | VASNSG | 888 | RFTISRDNAKNTV | 1058 | ASQFAS | 1228 | WGQGT |
| | GGGLVQA | | | | QREFVA | | RTNYAD | | YLQMNNLKPEDT | | | | QVTVSS |
| | GGSLKLS | | | | | | SVKG | | AVYYCNS | | | | |
| | CVASGLIL | | | | | | | | | | | | |
| | S | | | | | | | | | | | | |
| 209 | EVQLVES | 379 | IYTMG | 549 | WYRQAPGK | 719 | AATNAG | 889 | RFTISRDNAKNTVI | 1059 | LDYDY | 1229 | WGQGT |
| | GGGLVQA | | | | QREFVA | | TTSYAG | | LQMNNLKPEBTA | | | | QVTVSS |
| | GGSLRLS | | | | | | SVKG | | VYYCRV | | | | |
| | CAASGIIF | | | | | | | | | | | | |
| | S | | | | | | | | | | | | |
| 210 | EVQLVES | 380 | RNVMA | 550 | WYRQAPGK | 720 | IITTAHS | 890 | RFTISRDNAKNTL | 1060 | LPHYPTDS | 1230 | WGQGT |
| | GGGLVQP | | | | EREPVA | | TNYVDS | | YLEMNSLKPEDTG | | | | QVTVSS |
| | GGSLRLS | | | | | | VKG | | VYYCNK | | | | |
| | CAASRIIF | | | | | | | | | | | | |
| | S | | | | | | | | | | | | |
| 211 | EVQLVES | 381 | RNAMA | 551 | WYRQAPGK | 721 | IITSNHG | 891 | RFTISRDNAKNTL | 1061 | IPHYTVDS | 1231 | WGQGT |
| | GGGLVQP | | | | QREPVA | | TNYVDP | | YLQMNSLKPEDTG | | | | QVTVSS |
| | GGSLRLS | | | | | | VKG | | VYYCNK | | | | |
| | CAASRSIF | | | | | | | | | | | | |
| | S | | | | | | | | | | | | |
| 212 | KVQLVES | 382 | RITAFG | 552 | WYRQAPGR | 722 | GIFSGAL | 892 | RFTISRDNAKNTV | 1062 | DNN | 1232 | WGQGT |
| | GGGLVQA | | | | QREFVA | | TNYADS | | FLQMNSLKTEDTG | | | | QVTVSS |
| | GGSLRLS | | | | | | VKG | | TYYCRS | | | | |
| | CTASGNIA | | | | | | | | | | | | |
| 213 | EVQLVES | 383 | ITAFA | 553 | WYRQAPGK | 723 | GIFSGAI | 893 | RFTISRDNAKNTV | 1063 | DNN | 1233 | WGQGT |
| | GGGLVQA | | | | QRDFVA | | TNYADS | | FLQMNSLKTEDTA | | | | QVTVSS |
| | GGSLRLS | | | | | | VKG | | TYYCRA | | | | |
| | CTASGSD | | | | | | | | | | | | |
| | VR | | | | | | | | | | | | |
| 214 | EVQLVES | 384 | IYGMA | 554 | WYRQAPGK | 724 | SITGGY | 894 | RFTISRDDAKNTL | 1064 | LYSDY | 1234 | WGKGT |
| | GGGLVQA | | | | QRELVA | | GPNYVD | | YLQMNSLKPEDTA | | | | QVTVSS |
| | GGSLRLS | | | | | | SVKG | | VYYCNQ | | | | |
| | CVASGFIF | | | | | | | | | | | | |
| | S | | | | | | | | | | | | |
| 215 | EVQLVAS | 385 | IDGMN | 555 | WSRQAPGK | 725 | YITSSGS | 895 | RFTISRDNADNTV | 1065 | ATRSRLGLQQNY | 1235 | WGQGT |
| | GGGLVQT | | | | GRELVG | | TDYADS | | YLQMNSLKPEDTA | | | | QVTVSS |
| | GGSLRLS | | | | | | VKG | | VYYCAV | | | | |
| | CAASGSG | | | | | | | | | | | | |
| | FS | | | | | | | | | | | | |
| 216 | EVQLVES | 386 | IYTMA | 556 | WYRQAPGK | 726 | AVTYAG | 896 | RFTISRDDAKNKV | 1066 | NPSDNPW | 1236 | LGQGTQ |
| | GGGLVQA | | | | QRELVA | | NRYYVD | | YLQMNSLKPEDTA | | | | VTVSS |
| | GGSLRLS | | | | | | SVKG | | VYYCAA | | | | |
| | CAASGIIF | | | | | | | | | | | | |
| | T | | | | | | | | | | | | |
| 217 | EVQLVES | 387 | IDAMA | 557 | WYRQTPGK | 727 | AIFSGGL | 897 | RFTISRDNAKNTL | 1067 | RAPTGSDN | 1237 | WGQGT |
| | GGGLVQP | | | | QRDFVA | | THYADS | | YLQMNSLKPEDTA | | | | QVTVSS |
| | GGSLRLS | | | | | | VKG | | VYYCKF | | | | |
| | CAASGSIR | | | | | | | | | | | | |
| | S | | | | | | | | | | | | |
| 218 | EVQLVQS | 388 | SNITG | 558 | WYRQAPGK | 728 | AISSDGL | 898 | RVIISRDNVENTVY | 1068 | PGAG | 1238 | RGQGTQ |
| | GGGLVQA | | | | QRELVA | | AHYTDS | | LQMNSLKPEDTAV | | | | VTVSS |
| | GGSLRLS | | | | | | MKG | | YYCAA | | | | |
| | CAASGYIF | | | | | | | | | | | | |
| | S | | | | | | | | | | | | |
| 219 | EVQLVES | 389 | SDVMG | 559 | WFRQAPGK | 729 | YIHRSGT | 899 | RLTISRDNAKSTV | 1069 | GRYGSTSDTLYDY | 1239 | WGQGT |
| | GGGSVQA | | | | ERDFVA | | TYYADS | | YLQMNSLKPEDTA | | | | QVTVSS |
| | GGSLRLS | | | | | | VKG | | VYHCAA | | | | |
| | CAASQRT | | | | | | | | | | | | |
| | FS | | | | | | | | | | | | |
| 220 | EVPLVES | 390 | RDVTG | 560 | WFRQAPGK | 730 | YIHRSGE | 900 | RFTISRDNAKSTV | 1070 | GRYGSTSDTLYDY | 1240 | WGQGT |
| | GGGSVQA | | | | ERDFVA | | TTYYAD | | YLQMNSLKPEDTA | | | | QVTVSS |
| | GGSLRLS | | | | | | SVKG | | VYHCAA | | | | |
| | CAASQRT | | | | | | | | | | | | |
| | FS | | | | | | | | | | | | |
| 221 | EVQLVES | 391 | SDVMG | 561 | WFRQAPGK | 731 | YIHRSGT | 901 | RFTISRDNAKSTV | 1071 | GRYGSTADTLYDY | 1241 | WGQGT |
| | GGGSV*A | | | | ERDFVA | | TYYADS | | YLQMNSLKPEDTA | | | | QVTVSS |
| | GGSLRLS | | | | | | VKG | | VYHCAA | | | | |
| | CAASQRT | | | | | | | | | | | | |
| | FS | | | | | | | | | | | | |
| 222 | EVQLVES | 392 | RDVMG | 562 | WFRQAPGK | 732 | YSHRSG | 902 | RFTISRDNAKSTV | 1072 | GRYGSTSDTLYDY | 1242 | WGQGT |
| | GGGSVQA | | | | ERDFVA | | TTYYAD | | YLQMNSLKPEDTA | | | | QVTVSS |
| | GGSLrLSC | | | | | | SVKG | | VYHCAA | | | | |
| | AASQRTF | | | | | | | | | | | | |
| | S | | | | | | | | | | | | |
| 223 | XVQLVES | 393 | SDVMG | 563 | WFRQAPGK | 733 | YIHRSGT | 903 | RFTISXDNAKSTV | 1073 | GRYGSTSDTLYDY | 1243 | WGQGT |
| | GGGSVQA | | | | EGDFVA | | TYYADS | | YLQMNSLKPEDTA | | | | QVTVSS |
| | GGSLrLSC | | | | | | VKG | | VYHCAA | | | | |
| | AASQRTF | | | | | | | | | | | | |
| | S | | | | | | | | | | | | |
| 224 | EVQLVES | 394 | SDVMG | 564 | WFRQAPGK | 734 | YXHRSN | 904 | RFTISRDNAKSTV | 1074 | GRYGSTSDTLYDY | 1244 | WGQGT |
| | GGGSVQA | | | | ERDFVA | | TTYYAD | | YLQMNSLKPEDTA | | | | QVTVSS |
| | GGSLRLS | | | | | | SVKG | | VYHCAA | | | | |
| | CATSQRT | | | | | | | | | | | | |
| | FS | | | | | | | | | | | | |
| 225 | EVQLVES | 395 | HNTMA | 565 | WYRQAPGK | 735 | SISSGGN | 905 | RFTISRDNGNNTM | 1075 | KDWPPNYKNDY | 1245 | WGQGT |
| | GVGLVQA | | | | QRELAA | | TYYABS | | YLQMNNLKPEDT | | | | QVTVSS |
| | GGSLrLSC | | | | | | VKG | | AVYYCNW | | | | |
| | AASGYTF | | | | | | | | | | | | |
| | N | | | | | | | | | | | | |
| 226 | EVQLVES | 396 | HNTMA | 566 | WYRQAPVK | 736 | SISSGGS | 906 | RFTISRDNGNNTM | 1076 | KDWPPNYTNDY | 1246 | WGQGT |
| | GGGLVQA | | | | QRELAA | | TYYADS | | YLQMNNLKPEDT | | | | QVTVSS |
| | GGSLRLS | | | | | | VKG | | AVYYCNW | | | | |
| | CAASGYT | | | | | | | | | | | | |
| | FN | | | | | | | | | | | | |
| 227 | EVQLVES | 397 | VTSMG | 567 | WGRQIPGK | 737 | WITNEG | 907 | RFTISRDNAQNTL | 1077 | FSPRESSGNTY | 1247 | WGQGT |
| | GGGLVQA | | | | QRKLVA | | RTEYAD | | YLLMNSLKPEDTA | | | | QVTVSS |
| | GESLKLSC | | | | | | SVKG | | VYYCYG | | | | |
| | VASGNILR | | | | | | | | | | | | |
| 228 | EVQLVES | 398 | SNTMA | 568 | WFRQAPGK | 738 | AIMWRG | 908 | RFTISRDNAKNTV | 1078 | GGRRWNTRKDSSQY | 1248 | WGQGT |
| | GGGLVQA | | | | EREFGS | | DATYTD | | YLQMNSLKPEDTA | | DY | | QVTVSS |
| | GGSLRLS | | | | | | YADSMK | | IYYCAA | | | | |
| | CAASGRI | | | | | | D | | | | | | |
| | YS | | | | | | | | | | | | |
| 229 | EVQLVES | 399 | INDMG | 569 | WYRQPPGE | 739 | TLTSSDS | 909 | RFTISRDNAKNTV | 1079 | VINRRGDGRNWSREY | 1249 | WGQGT |
| | GGGSVQA | | | | QRELVA | | TKYADS | | YLQMNSLKPEDTA | | | | QVTVSS |
| | GGSLRLS | | | | | | VKS | | VYYCNA | | | | |
| | CTASGSIF | | | | | | | | | | | | |
| | S | | | | | | | | | | | | |
| 230 | EVQLVES | 400 | RMAMG | 570 | WYRQAPGV | 740 | IISPGGG | 910 | RFTISRDNAKNTV | 1080 | RNFEGRRVDY | 1250 | WGQGT |
| | GGGLVQP | | | | ERDFLA | | TNYADS | | YLQMNSLKPEDTA | | | | QVTVSS |
| | GGSLrLSC | | | | | | VKG | | VYYCNA | | | | |
| | AASGFTFS | | | | | | | | | | | | |
| 231 | EVQLVES | 401 | LNNMA | 571 | WYRQSPGK | 741 | LISGITS | 911 | RFSISRDNALNTV | 1081 | AWAGVEY | 1251 | WGQGT |
| | GGGLVQA | | | | KRELVA | | DPSTYY | | YLQMNSLKPEDTA | | | | QVTVSS |
| | GGSLrLSC | | | | | | LDSVRG | | VYYCKQ | | | | |
| | AASGSTY | | | | | | | | | | | | |
| | R | | | | | | | | | | | | |
| 232 | EVQLVES | 402 | IDVVS | 572 | WYRQAPgK | 742 | SITSAGR | 912 | RFGISRDNAKNTV | 1082 | LYRNAIY | 1252 | WGQGT |
| | GGGLVQA | | | | PRELAA | | IKYAES | | SLQMNSLKPEDTA | | | | QVTVSS |
| | GGSLrLSC | | | | | | VKG | | VYYCNA | | | | |
| | AASISANA | | | | | | | | | | | | |
| 233 | EVQLVES | 403 | DYAIG | 573 | WFRQAPGK | 743 | CIRNSD | 913 | RFTISSDNAKNTV | 1083 | TQIGRPRGDKGANRY | 1253 | RGQGTQ |
| | GGGLVQA | | | | EREGVS | | GRTYYA | | YLQMNSLKPEDTA | | CSXSRD | | VTVSS |
| | GGSLXLS | | | | | | DSVKG | | LYYCAA | | | | |
| | CAASGFT | | | | | | | | | | | | |
| | FD | | | | | | | | | | | | |
| 234 | EVQLXES | 404 | SNITG | 574 | WYRQAPGK | 744 | AISSDGL | 914 | RVIISRXNVENTVY | 1084 | PGAG | 1254 | RGQGTQ |
| | GGGLVQA | | | | QRELVA | | AHYTDS | | LQMNSLKPEDTAV | | | | VTVSS |
| | GGSLXLS | | | | | | MKG | | YYCAA | | | | |
| | XAASGYIF | | | | | | | | | | | | |
| | S | | | | | | | | | | | | |
| 235 | EVQLVES | 405 | IEAMA | 575 | WYRQAPGK | 745 | TINSASR | 915 | RFTISRDTGKSILY | 1085 | TTPLPYRRDF | 1255 | WGQGT |
| | GGGLVEA | | | | QRELVA | | TNYADS | | LQMNNLEPEDTAV | | | | QVTVSS |
| | GGSLRLS | | | | | | VKG | | YYCKI | | | | |
| | CATSGSTF | | | | | | | | | | | | |
| | G | | | | | | | | | | | | |
| 236 | EVQLVES | 406 | ITVPG | 576 | WYRQAPGK | 746 | VINSGG | 916 | RFTISIDNVKRTLY | 1086 | LKY | 1256 | WGQGT |
| | GGGSVQA | | | | QRELVA | | TKKYAD | | LEMNSLRPEDTAV | | | | QVTVSS |
| | GGSLRLS | | | | | | SVKG | | YYCST | | | | |
| | CAASGTT | | | | | | | | | | | | |
| | AT | | | | | | | | | | | | |
| 237 | EVQLVES | 407 | RFTMG | 577 | WFRQGPGK | 747 | AISWGG | 917 | RFTISRDNAQNTV | 1087 | BSRGPYNSNWHQSSV | 1257 | WGQGT |
| | GGGLVQA | | | | ERDFVA | | GRTNYE | | YLQMNSLKPEDTA | | SYDY | | QVTVSS |
| | GGSLRLS | | | | | | DSVKG | | VYYCAA | | | | |
| | CAASGRTI | | | | | | | | | | | | |
| | S | | | | | | | | | | | | |
| 238 | EVQLVES | 408 | RFTMG | 578 | WFRQAPGK | 748 | AISWGG | 918 | RFTISRDNAQNTV | 1088 | BTRGPYNSNWAQSSV | 1258 | WGQGT |
| | GGGLVQA | | | | ERDFVA | | GRTNYE | | YLQMNSLKPEDTA | | SYDG | | QVTVSS |
| | GGSLRLS | | | | | | DSVKG | | VYYCAA | | | | |
| | CAASGRTI | | | | | | | | | | | | |
| | S | | | | | | | | | | | | |
| 239 | EVQLVES | 409 | RFTMG | 579 | WFRQAPGK | 749 | AISWGG | 919 | RFTISRDNAQNTV | 1089 | BTRGPYNSNWAQSSV | 1259 | WGQGT |
| | GGGLVQA | | | | EREFVA | | GRTNYE | | YLQMNSLKPEDTA | | SYDY | | QVTVSS |
| | GGSLRLS | | | | | | DSVKG | | VYYCAA | | | | |
| | CAASGRTI | | | | | | | | | | | | |
| | S | | | | | | | | | | | | |
| 240 | EVQLVES | 410 | RFTMG | 580 | WFRQAPGK | 750 | AISWGG | 920 | RFTISRDNAQNTV | 1090 | BSRGPYNSNWHQSSV | 1260 | WGQGT |
| | GGGLVQA | | | | ERDFVA | | GRTNYE | | YLQMNSLKPEDTA | | SYDY | | QVTVSS |
| | GGSLRLS | | | | | | DSVKG | | VYYCAA | | | | |
| | CAASGRTI | | | | | | | | | | | | |
| | S | | | | | | | | | | | | |
| 241 | EVQLVES | 411 | RFTMG | 581 | WFRQAPGK | 751 | AISWGG | 921 | RFTISRDNAQNTV | 1091 | DTRGPYNSNWAQSSV | 1261 | WGQGT |
| | GGGLVQA | | | | ERDFVA | | GRTNYE | | YLQMNSLKPEDTA | | SYDT | | QVTVSS |
| | GGSLRLS | | | | | | DSVKG | | VYYCAA | | | | |
| | CAASGRTI | | | | | | | | | | | | |
| | S | | | | | | | | | | | | |
| 242 | EVQLVES | 412 | RFTMG | 582 | WFRQAPGK | 752 | AISWGG | 922 | RFTISRDNAQNTV | 1092 | DTRGPYNSNWAQSSV | 1262 | WGQGT |
| | GGGLVQA | | | | ERDFVA | | GRTNYE | | YLQMNSLKPEDTA | | SYDG | | QVTVSS |
| | GGSLRLS | | | | | | DSVKG | | VYYCAA | | | | |
| | CAASGRTI | | | | | | | | | | | | |
| | S | | | | | | | | | | | | |
| 243 | EVQLVES | 413 | RFTMG | 583 | WFRQAPGK | 753 | AISWGG | 923 | RFTISRDNAQNTV | 1093 | DTRGPYNSNWAQSSV | 1263 | WGQGT |
| | GGGLVQA | | | | ERDFVA | | GRTNYE | | YLQMNSLKPEDTA | | SYDG | | QVTVSS |
| | GDSLRLS | | | | | | DSVKG | | VYYCAA | | | | |
| | CAASGRTI | | | | | | | | | | | | |
| | S | | | | | | | | | | | | |
| 244 | EVQLVES | 414 | RFTMG | 584 | WFRQAPGK | 754 | AISWGG | 924 | RFTISRDNAQNTV | 1094 | BTRGPYNSNWHQSSV | 1264 | WGQGT |
| | GGGLVQA | | | | ERDFVA | | GRTNYE | | YLQMNSLKPEDTA | | SYDA | | QVTVSS |
| | GGSLRLS | | | | | | DSVKG | | VYYCAA | | | | |
| | CAASGRTI | | | | | | | | | | | | |
| | S | | | | | | | | | | | | |
| 245 | EVQLVES | 415 | RFTMG | 585 | WFRQAPGK | 755 | AISWGG | 925 | RFTISRDNARNTV | 1095 | BTRGPYNSNWAQSSV | 1265 | WGQGT |
| | GGGLVPA | | | | ERDFVA | | GRTDYE | | YLQMNSLKPEDTA | | SYNY | | QVTVSS |
| | GGSLRLS | | | | | | DSVKG | | VYYCAA | | | | |
| | CAASGRA | | | | | | | | | | | | |
| | IS | | | | | | | | | | | | |
| 246 | EVqLVESG | 416 | RFTMG | 586 | WFRQAPGK | 756 | AISWGG | 926 | RFTISRDNAQNTV | 1096 | BSRGPYNSNWHQSSV | 1266 | WGQGT |
| | GGLVQAG | | | | ERDFVA | | GRTKYE | | YLQMDSLKPEDTA | | SYDY | | QVTVSS |
| | GSLRLSC | | | | | | DSVTG | | VYYCAA | | | | |
| | AASGRTIS | | | | | | | | | | | | |
| 247 | EVQLVES | 417 | RFTMG | 587 | WFRQAPGK | 757 | AISWGG | 927 | RFTISRDNAQNTV | 1097 | BSRGPYNSNWHQSSV | 1267 | WGQGT |
| | GGGLVQA | | | | ERDFVA | | GRTKYE | | YLQMNSLKPEDTA | | SYDY | | QVTVSS |
| | GGSLRLS | | | | | | DSVTG | | VYYCAA | | | | |
| | CAASGRTI | | | | | | | | | | | | |
| | S | | | | | | | | | | | | |
| 248 | XVqLVES | 418 | RFTMG | 588 | WFRQAPGK | 758 | AISWGG | 928 | RSTISRDNAQNTV | 1098 | BTRGPYNSNWAQSSV | 1268 | WGQGT |
| | GGGLVQA | | | | ERDFVA | | GRTNYG | | YLQMNSLKPEDTA | | SYDY | | QVTVSS |
| | GGSLRLS | | | | | | DSVKG | | VYYCAA | | | | |
| | CAASGRTI | | | | | | | | | | | | |
| | S | | | | | | | | | | | | |
| 249 | EVQLVES | 419 | RFTMG | 589 | WFRQAPGK | 759 | AISWGG | 929 | RSTISRDNAQNTV | 1099 | BTRGPYNSNWAQSSV | 1269 | WGQGT |
| | GGGLVQA | | | | ERDFVA | | GRTNYE | | YLQMNSLKPEDTA | | SYDY | | QVTVSS |
| | GGSLRLS | | | | | | DSVKG | | VYYCAA | | | | |
| | CAASGRTI | | | | | | | | | | | | |
| | S | | | | | | | | | | | | |
| 250 | XVQLVES | 420 | RFTMG | 590 | WFRQAPGK | 760 | AISWGG | 930 | RFTISRDNAQNTV | 1100 | DSRGPYNSNWHQSSV | 1270 | WGQGT |
| | GGGLVQA | | | | ERDFVA | | GRTNYE | | YLQMNSLKPEDTA | | SYDY | | QVTVSS |
| | GGSLRLS | | | | | | BSVKD | | VYYCAA | | | | |
| | CAASGRTI | | | | | | | | | | | | |
| | S | | | | | | | | | | | | |
| 251 | EVQLVES | 421 | RFTMG | 591 | WFRQAPGK | 761 | AISWGG | 931 | RFTISRDNAQNTV | 1101 | BSRGPYNSNWHQSSV | 1271 | WGQGT |
| | GGGLVQA | | | | ERDFVA | | GRTNYE | | YLQMNSLKPEDTA | | SYDY | | QVTVSS |
| | GGSLRLS | | | | | | DSVKD | | VYYCAA | | | | |
| | CAASGRTI | | | | | | | | | | | | |
| | S | | | | | | | | | | | | |
| 252 | EV*LVESG | 422 | RFTMG | 592 | WFRQAPGK | 762 | AISWGG | 932 | RFTISRDNAQNTV | 1102 | DSRGPYNSNWHQSSV | 1272 | WGQGT |
| | GGLVQAG | | | | ERDFVA | | GRTKYE | | YLQMDSLKPEDTA | | SYDY | | QVTVSS |
| | GSLRLSC | | | | | | DSVTG | | VYYCAA | | | | |
| | AASGRTIS | | | | | | | | | | | | |
| 253 | EV*LVESG | 423 | RFTMG | 593 | WFRQAPGK | 763 | AISWGG | 933 | RFTISRDNAQNTV | 1103 | BSRGPYNSNWHQSSV | 1273 | WGQGT |
| | GGLVQAG | | | | ERDFVA | | GRTKYE | | YLQMDSLKPEDTA | | SYDY | | QVTVSS |
| | GSLRLSC | | | | | | DSVTG | | VYYCAA | | | | |
| | AASGRTIS | | | | | | | | | | | | |
| 254 | EVQLVES | 424 | INAMG | 594 | WYRQAPGK | 764 | VVTNGG | 934 | RFTVSREYAKNAV | 1104 | RGIIARWGSAPGNY | 1274 | WGQGT |
| | GGGLVQA | | | | QREVVA | | STEYAD | | YLQMNSLKPEDTA | | | | QVTVSS |
| | GGSLSLSC | | | | | | FVKG | | VYYCYA | | | | |
| | AASGASGI | | | | | | | | | | | | |
| | IYS | | | | | | | | | | | | |
| 255 | EVQLVES | 425 | ISSMG | 595 | WYRQAPGK | 765 | VVTNGG | 935 | RFTVSREYAKNAV | 1105 | RGIIARWGSAPGNY | 1275 | WGQGT |
| | GGGLVQA | | | | QREVVA | | STEYAD | | YLQMNSLKPEDTA | | | | QVTVSS |
| | GGSLRLS | | | | | | FVKG | | VYYCYA | | | | |
| | CAASGAS | | | | | | | | | | | | |
| | GTIYS | | | | | | | | | | | | |
| 256 | EVQLVES | 426 | YYAIG | 596 | WFRQAPGK | 766 | CISSSDG | 936 | RFTISRDNAKNTV | 1106 | TCVVNPEGYDF | 1276 | WGQGT |
| | GGGLVQP | | | | EREGVS | | STYYAB | | YLQMNSLKPEDTA | | | | QVTVSS |
| | GGSLRLS | | | | | | SVKG | | VYYCAT | | | | |
| | CAVSGFT | | | | | | | | | | | | |
| | SD | | | | | | | | | | | | |
| 257 | EVQLVES | 427 | INIMG | 597 | WYRQAPGK | 767 | YITKRGS | 937 | RFTISRDNAKNMA | 1107 | GPDGLGGQDDY | 1277 | WGQGT |
| | GGGLVQA | | | | QRDLVA | | TKYADS | | TLQMNSLKPEDTA | | | | QVTVSS |
| | GGSLRLS | | | | | | VKG | | VYYCAA | | | | |
| | CAASGSIS | | | | | | | | | | | | |
| | SINS | | | | | | | | | | | | |
| 258 | EVQLVES | 428 | ERIVG | 598 | WYRQAPGK | 768 | AITVPGI | 938 | RFTISRDSAKNTV | 1108 | PTYG | 1278 | RGQGTQ |
| | GGGLVQA | | | | QRELVA | | TNYTDS | | YLQMNKLKPEDT | | | | VTVSS |
| | GGSLRLA | | | | | | VKD | | AVYYCAA | | | | |
| | CQASRAI | | | | | | | | | | | | |
| 259 | EVQLVES | 429 | INNGE | 599 | WYRQAPGK | 769 | AIGSGG | 939 | RFTISKANAKNTL | 1109 | RSWRNY | 1279 | WGQGT |
| | GGGMVQ | | | | QREFVA | | TTDYAD | | YLQMNSLKPEDTA | | | | QVTVSS |
| | TGGSLRLS | | | | | | SVKG | | VYYCYV | | | | |
| | CAASGST | | | | | | | | | | | | |
| | LN | | | | | | | | | | | | |
| 260 | EVQLVES | 430 | TYAMG | 600 | WLRQAPGK | 770 | AISYSGA | 940 | RFTISRDNAKSTA | 1110 | SANRDLSLWVSTAYR | 1280 | WGQGT |
| | GGGLVQA | | | | ERQFVA | | TTYYAD | | YLQMNSLQPEDTA | | STGLWY | | QVTVSS |
| | GGSLRLS | | | | | | SVKG | | VYYCAA | | | | |
| | CTASGRT | | | | | | | | | | | | |
| | AS | | | | | | | | | | | | |
| 261 | EVQLVES | 431 | TYAMG | 601 | WFRQAPGE | 771 | TITWTG | 941 | RFTISRDNAKKTV | 1111 | DRRGYIETMSVNYDY | 1281 | WGQGT |
| | GGSLRLS | | | | ERQFVA | | YTYYTD | | YLRMDKLKPEDT | | | | QVTVSS |
| | GGGLVQA | | | | | | SVKG | | AVYYCAA | | | | |
| | CAASGGT | | | | | | | | | | | | |
| | FS | | | | | | | | | | | | |
| 262 | EVQLVES | 432 | INFMN | 602 | WYRQAPGK | 772 | QVTSGV | 942 | RFTISRDNAKNMV | 1112 | QGYFGSTWINY | 1282 | WGQGT |
| | GGGLVQP | | | | QRELVA | | TSGGTT | | SLQMNSLKPEDTA | | | | QVTVSS |
| | GGSLRLS | | | | | | YYDDSV | | VYYCNV | | | | |
| | CAASGSIS | | | | | | KG | | | | | | |
| | I | | | | | | | | | | | | |
| 263 | EVQLVES | 433 | INFMN | 603 | WYRQAPGK | 773 | QVTSGV | 943 | RFTISRDNAKNMV | 1113 | QGYFGSTWINY | 1283 | WGQGT |
| | GGGLVQP | | | | QRELVA | | TSGGTT | | SLQMNSLKPEDTA | | | | QVTVSS |
| | GGSLRLS | | | | | | YYDDSV | | VYYCNV | | | | |
| | CAAPGSIS | | | | | | KG | | | | | | |
| | I | | | | | | | | | | | | |
| 264 | EVPLVES | 434 | INFMN | 604 | WYRQAPGK | 774 | QVTSGV | 944 | RFTISRDNAKNMV | 1114 | QGYFGSTWINY | 1284 | WGQGT |
| | GGGLVQP | | | | QRELVA | | TSGGTT | | SLQMNSLKPEDTA | | | | QVTVSS |
| | GGSLRLS | | | | | | YYDDSV | | VYYCNV | | | | |
| | CAASGSIS | | | | | | KG | | | | | | |
| | I | | | | | | | | | | | | |
| 265 | EVRLVES | 435 | INFMN | 605 | WYRQAPGK | 775 | QVTSGV | 945 | RFTISRDNAKNMV | 1115 | QGYFGSTWINY | 1285 | WGQGT |
| | GGGLVQP | | | | QRELVA | | TSGGTT | | SLQMNSLKPEDTA | | | | QVTVSS |
| | GGSLRLS | | | | | | YYDDSV | | VYYCNV | | | | |
| | CAASGSIS | | | | | | KG | | | | | | |
| | I | | | | | | | | | | | | |
| 266 | EVQLVES | 436 | RYTMT | 606 | WVRQAPGK | 776 | SITSRGS | 946 | RFTISRDNAKNTL | 1116 | SGTETWYDRTY | 1286 | WGQGT |
| | GGGLVQP | | | | EPEWVS | | STNYAD | | YLQMNSLKPGDT | | | | QVTVSS |
| | GGSLRLS | | | | | | SVKG | | AMYYCAK | | | | |
| | CAASGFT | | | | | | | | | | | | |
| | FS | | | | | | | | | | | | |
| 267 | EVQLVES | 437 | RYTMT | 607 | WVRQAPGK | 777 | SITSRGS | 947 | RFTISRDNAKNTL | 1117 | SGTETWYDRTY | 1287 | WGQGT |
| | GGGLVQP | | | | EPEWVS | | STNYAD | | YLQMNSLKPGDT | | | | QVTVSS |
| | GGSLRLS | | | | | | SAKG | | AMYYCAK | | | | |
| | CAASGFT | | | | | | | | | | | | |
| | FS | | | | | | | | | | | | |
| 268 | EVQLVES | 438 | INTMA | 608 | WYRQAPGK | 778 | SITSRGT | 948 | RFTISTSNDKSTVY | 1118 | DKDGVIGYSVGY | 1288 | WGQGT |
| | GGGLVKA | | | | QREWIT | | TRYABS | | LQMNSLKPEDTAV | | | | QVTVSS |
| | GGSLRLS | | | | | | VKG | | YYCAA | | | | |
| | CAASGSIF | | | | | | | | | | | | |
| | S | | | | | | | | | | | | |
| 269 | EVQLVES | 439 | INVMG | 609 | WYRQAPGK | 779 | SITSRGT | 949 | RFTISRGNDKSTV | 1119 | BKGGVIGYSEGY | 1289 | WGQGT |
| | GGGLVEA | | | | QRELIG | | TRYTDS | | YLQMNSLKPEDTA | | | | QVTVSS |
| | GGSLRLS | | | | | | VKG | | VYYCAA | | | | |
| | CAASGSIF | | | | | | | | | | | | |
| | S | | | | | | | | | | | | |
| 270 | EVQLVES | 440 | INVMG | 610 | WYRQAPGK | 780 | SITSRGT | 950 | RFTISRGNDMSTV | 1120 | BKGGVIGYSVGY | 1290 | WGQGT |
| | GGGLVEA | | | | QRELIG | | TRYADS | | YLQMNSLKPEDTA | | | | QVTVSS |
| | GGSLRLS | | | | | | VKG | | VYYCAA | | | | |
| | CAASGSIF | | | | | | | | | | | | |
| | S | | | | | | | | | | | | |
| 271 | EVQLVES | 441 | IKAMG | 611 | WYRQAPGN | 781 | TITGTGK | 951 | RFTISRDIGTLYLQ | 1121 | LSWPAGDY | 1291 | WGQGT |
| | GGGLVQA | | | | QREMVA | | TNYADS | | MNSLKPEDTAVY | | | | QVTVSS |
| | GGSLQLS | | | | | | VKG | | YCNL | | | | |
| | CATSGESF | | | | | | | | | | | | |
| | S | | | | | | | | | | | | |
| 272 | EVQLVES | 442 | IKAMG | 612 | WYRQAPGN | 782 | TITGTGS | 952 | RFTISRXIGTLYLQ | 1122 | LSWPAGDY | 1292 | WDQGT |
| | GGGLVQA | | | | QRELVA | | TTYADS | | MNSLKPEDTGVY | | | | QVTVSS |
| | GGSLRLS | | | | | | AKG | | YCNL | | | | |
| | CTTSGRSF | | | | | | | | | | | | |
| | S | | | | | | | | | | | | |
| 273 | EVQLVES | 443 | INTMA | 613 | WYRQAPGN | 783 | IIFPGTG | 953 | RFTISRVNAKNTL | 1123 | VRYIGGNYFPFDS | 1293 | WGQGT |
| | GGALVQA | | | | ERDWVA | | GSTVYE | | YLQMDSLRPEDTG | | | | QVTVSS |
| | GGSLRLS | | | | | | DSVKG | | VYYCAR | | | | |
| | CAASGFA | | | | | | | | | | | | |
| | FS | | | | | | | | | | | | |
| 274 | EVQLVES | 444 | INTMA | 614 | WYRQAPGK | 784 | IIAPGTG | 954 | RFTISRVNAKNTL | 1124 | VRYTGGNYFPFDS | 1294 | WGQGT |
| | GGALVQA | | | | QRDWVA | | GSTHYE | | YLQMDSLRPEDTA | | | | QVTVSS |
| | GGSLRLS | | | | | | DSVKG | | VYYCAR | | | | |
| | CAASGFX | | | | | | | | | | | | |
| | FS | | | | | | | | | | | | |
| 275 | XVQLVES | 445 | NYPMG | 615 | WVRQAPGK | 785 | GISASSI | 955 | RFTISRDHAKNTL | 1125 | LRNYRYFGDMDY | 1295 | RGEGTL |
| | GGGLVQP | | | | GLEWVS | | RTSYAD | | YLQMNSLKVEDT | | | | VTVSS |
| | GGSLRLS | | | | | | SVKG | | AVYYCAQ | | | | |
| | CAASGFA | | | | | | | | | | | | |
| | FS | | | | | | | | | | | | |
| 276 | EVQLVES | 446 | HYPMG | 616 | WVRQAPGK | 786 | GISASSI | 956 | RFTISRDHAKNTL | 1126 | LRNYRYFGDMDY | 1296 | RGEGTL |
| | GGGLVQP | | | | GLEWVS | | RTSYAD | | YLQMNSLKVEDT | | | | VTVSS |
| | GGSLRLS | | | | | | SVKG | | AVYYCAQ | | | | |
| | CAASGFA | | | | | | | | | | | | |
| | FS | | | | | | | | | | | | |
| 277 | EVQLVES | 447 | RCAMG | 617 | WFRQAPGK | 787 | TISANGE | 957 | RFTISRDNAKNTV | 1127 | RRTFTRSSNRNEYAD | 1297 | WGQGT |
| | GGGLVQA | | | | EREFVA | | LIYYAN | | YLQMNSLKPEDTA | | | | QVTVSS |
| | GGSPRLSC | | | | | | FVEG | | VYFCAA | | | | |
| | VASGRTF | | | | | | | | | | | | |
| | S | | | | | | | | | | | | |
| 278 | EVQLVES | 448 | INAMG | 618 | WYRQAPGK | 788 | TITTRGT | 958 | RFTISKDNAKNTM | 1128 | BSPPYGMGSDLGY | 1298 | WGQGT |
| | GGGLVQA | | | | QRELVA | | TNYVDA | | YLQMNSLKPEDTA | | | | QVTVSS |
| | GGSLTLSC | | | | | | VKG | | VYYCAA | | | | |
| | AASGSVF | | | | | | | | | | | | |
| | S | | | | | | | | | | | | |
| 279 | EVQLVES | 449 | PNVMG | 619 | WFRQAPGD | 789 | NIYSGGS | 959 | RFTILSDNAKNTV | 1129 | KRVGQSWFDSGY | 1299 | WGQGT |
| | GGGLVQA | | | | QREFVA | | TNYADT | | YLQMTSLKPEDTG | | | | QVTVSS |
| | GGSLRLS | | | | | | VKG | | VYYCSV | | | | |
| | CAASGRM | | | | | | | | | | | | |
| | FS | | | | | | | | | | | | |
| 280 | EVQLVES | 450 | INNMG | 620 | WYRQAPGN | 790 | RITSGGS | 960 | RFTISIDNTRKTVY | 1130 | AIVSSRWGAEXTNDY | 1300 | WGQGT |
| | GGGLVQA | | | | KRDLVA | | HRNYAB | | LQMNSLKPEDTAV | | | | QVTVSS |
| | GGSLNLS | | | | | | SVKG | | YYCYG | | | | |
| | CAASGRIL | | | | | | | | | | | | |
| | R | | | | | | | | | | | | |
| 281 | EVQLVES | 451 | FNIMG | 621 | WYRQAPGK | 791 | TMTSGG | 961 | RSTISRENAKKTIT | 1131 | KTLTAWSTSTGDY | 1301 | WGQGT |
| | GGGLVQA | | | | QREMVA | | NTRYAD | | LQMNNLKPEDTG | | | | QVTVSS |
| | GGSLRLS | | | | | | SVKG | | VYYCNL | | | | |
| | CGASGSIG | | | | | | | | | | | | |
| | T | | | | | | | | | | | | |
| 282 | EVQLVES | 452 | DYAIG | 622 | WFRQAPGK | 792 | CISSPDG | 962 | RFTVSSDNAKNTA | 1132 | RRGGSYYFCDPLTVY | 1302 | WGQGT |
| | GGGLVQA | | | | EREGVS | | STYLVD | | YLQMNSLKPEDTA | | EYDY | | QVTVSS |
| | GGSLKLS | | | | | | SVKG | | VYYCAL | | | | |
| | CAASGFT | | | | | | | | | | | | |
| | FD | | | | | | | | | | | | |
| 283 | EVQLVES | 453 | NTVMS | 623 | WARQAPGK | 793 | TISASGV | 963 | RFTISRDYAKRTL | 1133 | RKSYTDYDPPRWDYD | 1303 | WGQGT |
| | GGALVQP | | | | GLEWVS | | RTRYAD | | YLQMNSLSPEDTG | | T | | QVTVSS |
| | GGSLRLS | | | | | | SVTG | | VYYCVR | | | | |
| | CAASGFA | | | | | | | | | | | | |
| | FS | | | | | | | | | | | | |
| 284 | EVQLVES | 454 | YQNMG | 624 | WYRQAPGN | 794 | SNWATG | 964 | RFTISRDDAKNVV | 1134 | LSRPWS | 1304 | WGQGT |
| | GGGLVQA | | | | EREWVA | | ATAYAD | | YLQMNNLKPEDT | | | | QVTVSS |
| | GGSLRLS | | | | | | SVKG | | AVYYCNR | | | | |
| | CAASGGT | | | | | | | | | | | | |
| | FR | | | | | | | | | | | | |
| 285 | EVQLVES | 455 | FKRVA | 625 | WHRQAPGN | 795 | AIWNTD | 965 | RFTISRDNAKKTV | 1135 | NRGSYGTY | 1305 | WGQGT |
| | GGGLVQA | | | | ERELVA | | NTDYAD | | YLQMNRLKPEDT | | | | QVTVSS |
| | GGSLRLS | | | | | | SVKG | | AVYYCSA | | | | |
| | CTVSITTY | | | | | | | | | | | | |
| | S | | | | | | | | | | | | |
| 286 | EVQLVDS | 456 | GYVLG | 626 | WFRQAPGK | 796 | AIIRSGG | 966 | RFTISRDNAKNTV | 1136 | SSVLGRSPALYDL | 1306 | WGQGT |
| | GGRLVQP | | | | EREFVA | | NTAYSD | | YLQMKSLKPEDTG | | | | QVTVSS |
| | GDLLRLS | | | | | | SVKG | | IYYCAR | | | | |
| | CTTSGFAS | | | | | | | | | | | | |
| | S | | | | | | | | | | | | |
| 287 | EVQLVES | 457 | RNVMA | 627 | WFRQAPGK | 797 | AIRWSG | 967 | RFTMSRDNAKNTI | 1137 | DARLYSPLPRRSSAYD | 1307 | WGQGT |
| | RGGLVQA | | | | EREFVA | | GTTSYA | | YLEMNSLKPEDTA | | Y | | QVTVSS |
| | GGSLRLS | | | | | | DFVKG | | VYYCAA | | | | |
| | CTASERTF | | | | | | | | | | | | |
| | S | | | | | | | | | | | | |
| 288 | EVQLVES | 458 | DYDIG | 628 | WFRQTPGK | 798 | CISSSDG | 968 | RFTISSDNAKNTV | 1138 | VKRAPKQYCSDYEAY | 1308 | WGQETQ |
| | GGGLVQP | | | | EREGVS | | YKFYAD | | YLQMNSLKPEDTA | | DY | | VTVSS |
| | GGSLRLS | | | | | | SVKD | | VYYCAA | | | | |
| | CAASGFT | | | | | | | | | | | | |
| | FD | | | | | | | | | | | | |
| 289 | EVQLVES | 459 | LGLVQ | 629 | WHRQVSRK | 799 | QLNSGG | 969 | RFTISRDNAKSTV | 1139 | RVIVPGGFRDY | 1309 | WGQGT |
| | GGGLVQA | | | | QRGLVA | | TTTYAD | | YLQMHSLKPEDTA | | | | QVTVSS |
| | GGSLRLS | | | | | | SVKG | | VYYCFL | | | | |
| | CAASGSIS | | | | | | | | | | | | |
| | S | | | | | | | | | | | | |
| 290 | EVQLVES | 460 | IRAMD | 630 | WYRQAPGK | 800 | TITSDGS | 970 | RFTISRDNAKNTL | 1140 | PPYGSSCPLV | 1310 | WGQGT |
| | GGGLVQA | | | | ERELVA | | TYYADS | | YLQMNSLKPEDTA | | | | QVTVSS |
| | GGSLRLS | | | | | | VKG | | AYYCKA | | | | |
| | CVASGBTI | | | | | | | | | | | | |
| | C | | | | | | | | | | | | |
| 291 | EVQLVES | 461 | INIVN | 631 | WYHQAPGK | 801 | FITNGEE | 971 | RFTVSRDNAKNTV | 1141 | HIMWPTVRDY | 1311 | WGQGT |
| | GGGLVQA | | | | QRELVA | | TNYAET | | SLQMNSLKPEDTG | | | | QVTVSS |
| | GGSLTLSC | | | | | | VKG | | VYYCNL | | | | |
| | AASGNISS | | | | | | | | | | | | |
| 292 | EVQLVES | 462 | YYAIG | 632 | WFRQAPGK | 802 | CISSSAG | 972 | RFTISRDNAKNTL | 1142 | QTAGTSIGCHISIGWY | 1312 | WGQGT |
| | GGGLVQP | | | | EREGVS | | SAYYAD | | YLQMNSLKPEDTA | | DY | | QVTVSS |
| | GGSLRLS | | | | | | SVKG | | VYYCAA | | | | |
| | CAASGITL | | | | | | | | | | | | |
| | N | | | | | | | | | | | | |
| 293 | EVQLVES | 463 | DYAIG | 633 | WFRQAPGK | 803 | CISSSDG | 973 | RFTISSDNAKNTV | 1143 | ALRTVLAGTPTCDRY | 1313 | WGQGT |
| | GGGLVQA | | | | EREGVS | | SIFYADS | | YLQMNSLKPEDTA | | EYDY | | QVTVSS |
| | GGSLRLS | | | | | | VKG | | VYYCAA | | | | |
| | CAASGFT | | | | | | | | | | | | |
| | FD | | | | | | | | | | | | |
| 294 | EVQLVES | 464 | INIVN | 634 | WYHQAPGK | 804 | FITNGEE | 974 | RFTVSRDNAKNTV | 1144 | HIMWPTVRDY | 1314 | WGQGT |
| | GGGLVQA | | | | QRELVA | | TNYAET | | SLQMNSLKPEDTG | | | | QVTVSS |
| | GGSLTLSC | | | | | | VKG | | VYYCNL | | | | |
| | AASGNISS | | | | | | | | | | | | |
| | FD | | | | | | | | | | | | |
| 295 | EVQLVES | 465 | INIVN | 635 | WYHQAPGK | 805 | FITNGEE | 975 | RFTVSRDNAKNTV | 1145 | HIMWPTVRDY | 1315 | WGQGT |
| | GGGLVQA | | | | QRELVA | | TNYAET | | SLQMNSLKPEDTG | | | | QVTVSS |
| | GGSLTLSC | | | | | | VKG | | VYYCNL | | | | |
| | AASGNISS | | | | | | | | | | | | |

(□ID□ refers to the SEQ ID NO as used herein)

[0332] Thus, in the Nanobodies of the invention, at least one of the CDR1, CDR2 and CDR3 sequences present is suitably chosen from the group consisting of the CDR1, CDR2 and CDR3 sequences, respectively, listed in Table A-1; or from the group of CDR1, CDR2 and CDR3 sequences, respectively, that have at least 80%, preferably at least 90%, more preferably at least 95%, even more preferably at least 99% □sequence identity □ (as defined herein) with at least one of the CDR1, CDR2 and CDR3 sequences, respectively, listed in Table A-1; and/or from the group consisting of the CDR1, CDR2 and CDR3 sequences, respectively, that have 3, 2 or only 1 □amino acid difference(s)□ (as defined herein) with at least one of the CDR1, CDR2 and CDR3 sequences, respectively, listed in Table A-1.

[0333] In this context, by □suitably chosen□ is meant that, as applicable, a [symbol] seq chosen from suitable CDR1 sequences (i.e. as defined herein), a CDR2 sequence is chosen from suitable CDR2 sequences (i.e. as defined herein), and a CDR3 sequence is chosen from suitable CDR3 sequence (i.e. as defined herein), respectively. More in particular, the CDR sequences are preferably chosen such that the Nanobodies of the invention bind to Integrins with an affinity (suitably measured and/or expressed as a K_{D}-value (actual or apparent), a K_{A}-value (actual or apparent), a kₒₙ-rate and/or a k_{off}-rate, or alternatively as an IC₅₀ value, as further described herein) that is as defined herein.

[0334] In particular, in the Nanobodies of the invention, at least the CDR3 sequence present is suitably chosen from the group consisting of the CDR3 sequences listed in Table A-1 or from the group of CDR3 sequences that have at least 80%, preferably at least 90%, more preferably at least 95%, even more preferably at least 99% sequence identity with at least one of the CDR3 sequences listed in Table A-1; and/or from the group consisting of the CDR3 sequences that have 3, 2 or only 1 amino acid difference(s) with at least one of the CDR3 sequences listed in Table A-1.

[0335] Preferably, in the Nanobodies of the invention, at least two of the CDR1, CDR2 and CDR3 sequences present are suitably chosen from the group consisting of the CDR1, CDR2 and CDR3 sequences, respectively, listed in Table A-1 or from the group consisting of CDR1, CDR2 and CDR3 sequences, respectively, that have at least 80%, preferably at least 90%, more preferably at least 95%, even more preferably at least 99% sequence identity with at least one of the CDR1, CDR2 and CDR3 sequences, respectively, listed in Table A-1; and/or from the group consisting of the CDR1, CDR2 and CDR3 sequences, respectively, that have 3, 2 or only 1 □amino acid difference(s)□ with at least one of the CDR1, CDR2 and CDR3 sequences, respectively, listed in Table A-1.

[0336] In particular, in the Nanobodies of the invention, at least the CDR3 sequence present is suitably chosen from the group consisting of the CDR3 sequences listed in Table A-1 or from the group of CDR3 sequences that have at least 80%, preferably at least 90%, more preferably at least 95%, even more preferably at least 99% sequence identity with at least one of the CDR3 sequences listed in Table A-1, respectively; and at least one of the CDR1 and CDR2 sequences present is suitably chosen from the group consisting of the CDR1 and CDR2 sequences, respectively, listed in Table A-1 or from the group of CDR1 and CDR2 sequences, respectively, that have at least 80%, preferably at least 90%, more preferably at least 95%, even more preferably at least 99% sequence identity with at least one of the CDR1 and CDR2 sequences, respectively, listed in Table A-1; and/or from the group consisting of the CDR1 and CDR2 sequences, respectively, that have 3, 2 or only 1 amino acid difference(s) with at least one of the CDR1 and CDR2 sequences, respectively, listed in Table A-1.

[0337] Most preferably, in the Nanobodies of the invention, all three CDR1, CDR2 and CDR3 sequences present are suitably chosen from the group consisting of the CDR1, CDR2 and CDR3 sequences, respectively, listed in Table A-1 or from the group of CDR1, CDR2 and CDR3 sequences, respectively, that have at least 80%, preferably at least 90%, more preferably at least 95%, even more preferably at least 99% sequence identity with at least one of the CDR1, CDR2 and CDR3 sequences, respectively, listed in Table A-1; and/or from the group consisting of the CDR1, CDR2 and CDR3 sequences, respectively, that have 3, 2 or only 1 amino acid difference(s) with at least one of the CDR1, CDR2 and CDR3 sequences, respectively, listed in Table A-I.

[0338] Even more preferably, in the Nanobodies of the invention, at least one of the CDR1, CDR2 and CDR3 sequences present is suitably chosen from the group consisting of the CDR1, CDR2 and CDR3 sequences, respectively, listed in Table A-1. Preferably, in this aspect, at least one or preferably both of the other two CDR sequences present are suitably chosen from CDR sequences that have at least 80%, preferably at least 90%, more preferably at least 95%, even more preferably at least 99% sequence identity with at least one of the corresponding CDR sequences, respectively, listed in Table A-1; and/or from the group consisting of the CDR sequences that have 3, 2 or only 1 amino acid difference(s) with at least one of the corresponding sequences, respectively, listed in Table A-1.

[0339] In particular, in the Nanobodies of the invention, at least the CDR3 sequence present is suitably chosen from the group consisting of the CDR3 listed in Table A-1. Preferably, in this aspect, at least one and preferably both of the CDR1 and CDR2 sequences present are suitably chosen from the groups of CDR1 and CDR2 sequences, respectively, that have at least 80%, preferably at least 90%, more preferably at least 95%, even more preferably at least 99% sequence identity with the CDR1 and CDR2 sequences, respectively, listed in Table A-1; and/or from the group consisting of the CDR1 and CDR2 sequences, respectively, that have 3, 2 or only 1 amino acid difference(s) with at least one of the CDR1 and CDR2 sequences, respectively, listed in Table A-1.

[0340] Even more preferably, in the Nanobodies of the invention, at least two of the CDR1, CDR2 and CDR3 sequences present are suitably chosen from the group consisting of the CDR1, CDR2 and CDR3 sequences, respectively, listed in Table A-1. Preferably, in this aspect, the remaining CDR sequence present is suitably chosen from the group of CDR sequences that have at least 80%, preferably at least 90%, more preferably at least 95%, even more preferably at least 99% sequence identity with at least one of the corresponding CDR sequences listed in Table A-1; and/or from the group consisting of CDR sequences that have 3, 2 or only 1 amino acid difference(s) with at least one of the corresponding sequences listed in Table A-1.

[0341] In particular, in the Nanobodies of the invention, at least the CDR3 sequence is suitably chosen from the group consisting of the CDR3 sequences listed in Table A-1, and either the CDR1 sequence or the CDR2 sequence is suitably chosen from the group consisting of the CDR1 and CDR2 sequences, respectively, listed in Table A-1. Preferably, in this aspect, the remaining CDR sequence present is suitably chosen from the group of CDR sequences that have at least 80%, preferably at least 90%, more preferably at least 95%, even more preferably at least 99% sequence identity with at least one of the corresponding CDR sequences listed in Table A-1; and/or from the group consisting of CDR sequences that have 3, 2 or only 1 amino acid difference(s) with the corresponding CDR sequences listed in Table A-1

[0342] Even more preferably, in the Nanobodies of the invention, all three CDR1, CDR2 and CDR3 sequences present are suitably chosen from the group consisting of the CDR1, CDR2 and CDR3 sequences, respectively, listed in Table A-1.

[0343] Also, generally, the combinations of CDR□s listed in Table A (i.e. those mentioned on the same line in Table A-1) are preferred. Thus, it is generally preferred that, when a CDR in a Nanobody of the invention is a CDR sequence mentioned in Table A-1 or is suitably chosen from the group of CDR sequences that have at least 80%, preferably at least 90%, more preferably at least 95%, even more preferably at least 99% sequence identity with a CDR sequence listed in Table A-1; and/or from the group consisting of CDR sequences that have 3, 2 or only 1 amino acid difference(s) with a CDR sequence listed in Table A-1, that at least one and preferably both of the other CDR D s are suitably chosen from the CDR sequences that belong to the same combination in Table A-1 (i.e. mentioned on the same line in Table A-1) or are suitably chosen from the group of CDR sequences that have at least 80%, preferably at least 90%, more preferably at least 95%, even more preferably at least 99% sequence identity with the CDR sequence(s) belonging to the same combination and/or from the group consisting of CDR sequences that have 3, 2 or only 1 amino acid difference(s) with the CDR sequence(s) belonging to the same combination. The other preferences indicated in the above paragraphs also apply to the combinations of CDR□s mentioned in Table A-1.

[0344] Thus, by means of non-limiting examples, a Nanobody of the invention can for example comprise a CDR1 sequence that has more than 80% sequence identity with one of the CDR1 sequences mentioned in Table A-1, a CDR2 sequence that has 3, 2 or 1 amino acid difference with one of the CDR2 sequences mentioned in Table A-1 (but belonging to a different combination), and a CDR3 sequence.

[0345] Some preferred Nanobodies of the invention may for example comprise: (I) a CDR1 sequence that has more than 80% sequence identity with one of the CDR1 sequences mentioned in Table A-1; a CDR2 sequence that has 3, 2 or 1 amino acid difference with one of the CDR2 sequences mentioned in Table A-1 (but belonging to a different combination); and a CDR3 sequence that has more than 80% sequence identity with one of the CDR3 sequences mentioned in Table A-1 (but belonging to a different combination); or (2) a CDR1 sequence that has more than 80% sequence identity with one of the CDR1 sequences mentioned in Table A-1; a CDR2 sequence, and one of the CDR3 sequences listed in Table A-1; or (3) a CDR1 sequence; a CDR2 sequence that has more than 80% sequence identity with one of the CDR2 sequence listed in Table A-1; and a CDR3 sequence that has 3, 2 or 1 amino acid differences with the CDR3 sequence mentioned in Table A-1 that belongs to the same combination as the CDR2 sequence.

[0346] Some particularly preferred Nanobodies of the invention may for example comprise: (1) a CDR1 sequence that has more than 80% sequence identity with one of the CDR1 sequences mentioned in Table A-1; a CDR2 sequence that has 3, 2 or 1 amino acid difference with the CDR2 sequence mentioned in Table A-1 that belongs to the same combination; and a CDR3 sequence that has more than 80% sequence identity with the CDR3 sequence mentioned in Table A-1 that belongs to the same combination; (2) a CDR1 sequence; a CDR 2 listed in Table A-1 and a CDR3 sequence listed in Table A-1 (in which the CDR2 sequence and CDR3 sequence may belong to different combinations).

[0347] Some even more preferred Nanobodies of the invention may for example comprise: (1) a CDR1 sequence that has more than 80% sequence identity with one of the CDR1 sequences mentioned in Table A-1; the CDR2 sequence listed in Table A-1 that belongs to the same combination; and a CDR3 sequence mentioned in Table A-1 that belongs to a different combination; or (2) a CDR1 sequence mentioned in Table A-1; a CDR2 sequence that has 3, 2 or 1 amino acid differences with the CDR2 sequence mentioned in Table A-1 that belongs to the same combination; and a CDR3 sequence that has more than 80% sequence identity with the CDR3 sequence listed in Table A-1 that belongs to the same or a different combination.

[0348] Particularly preferred Nanobodies of the invention may for example comprise a CDR1 sequence mentioned in Table A-1, a CDR2 sequence that has more than 80% sequence identity with the CDR2 sequence mentioned in Table A-1 that belongs to the same combination; and the CDR3 sequence mentioned in Table A-1 that belongs to the same combination.

[0349] In the most preferred Nanobodies of the invention, the CDR1, CDR2 and CDR3 sequences present are suitably chosen from one of the combinations of CDR1, CDR2 and CDR3 sequences, respectively, listed in Table A-1.

[0350] According to another preferred, but non-limiting aspect of the invention (a) CDR1 has a length of between 1 and 12 amino acid residues, and usually between 2 and 9 amino acid residues, such as 5, 6 or 7 amino acid residues; and/or (b) CDR2 has a length of between 13 and 24 amino acid residues, and usually between 15 and 21 amino acid residues, such as 16 and 17 amino acid residues; and/or (c) CDR3 has a length of between 2 and 35 amino acid residues, and usually between 3 and 30 amino acid residues, such as between 6 and 23 amino acid residues.

[0351] In another preferred, but non-limiting aspect, the invention relates to a Nanobody in which the CDR sequences (as defined herein) have more than 80%, preferably more than 90%, more preferably more than 95%, such as 99% or more sequence identity (as defined herein) with the CDR sequences of at least one of the amino acid sequences of SEQ ID NO□s: 1316 to 1476, and SEQ ID NO: 1485, 1486, and 1487 (see Table 1).

[0352] Generally, Nanobodies with the above CDR sequences may be as further described herein, and preferably have framework sequences that are also as further described herein. Thus, for example and as mentioned herein, such Nanobodies may be naturally occurring Nanobodies (from any suitable species), naturally occurring V_{HH} sequences (i.e. from a suitable species of Camelid) or synthetic or semi-synthetic amino acid sequences or Nanobodies, including but not limited to partially humanized Nanobodies or V_{HH} sequences, fully humanized Nanobodies or V_{HH} sequences, camelized heavy chain variable domain sequences, as well as Nanobodies that have been obtained by the techniques mentioned herein.

[0353] Thus, in one specific, but non-limiting aspect, the invention relates to a humanized Nanobody, which consists of 4 framework regions (FR1 to FR4 respectively) and 3 complementarity determining regions (CDR1 to CDR3 respectively), in which CDR1 to CDR3 are as defined herein and in which said humanized Nanobody comprises at least one humanizing substitution (as defined herein), and in particular at least one humanizing substitution in at least one of its framework sequences (as defined herein).

[0354] In another preferred, but non-limiting aspect, the invention relates to a Nanobody in which the CDR sequences have at least 70% amino acid identity, preferably at least 80% amino acid identity, more preferably at least 90% amino acid identity, such as 95% amino acid identity or more or even essentially 100% amino acid identity with the CDR sequences of at least one of the amino acid sequences of SEQ ID NO□131s6 to 1476, and SEQ ID NO: 1485, 1486, and 1487 (see Table 1). This degree of amino acid identity can for example be determined by determining the degree of amino acid identity (in a manner described herein) between said Nanobody and one or more of the sequences of SEQ ID NO□131s6 to 1476, and SEQ ID NO: 1485, 1486, and 1487 (see Table 1), in which the amino acid residues that form the framework regions are disregarded. Such Nanobodies can be as further described herein.

[0355] In another preferred, but non-limiting aspect, the invention relates to a Nanobody with an amino acid sequence that is chosen from the group consisting of SEQ ID NO□s: 1316 to 1476, and SEQ ID NO: 1485, 1486, and 1487 (see Table 1) or from the group consisting of from amino acid sequences that have more than 80%, preferably more than 90%, more preferably more than 95%, such as 99% or more sequence identity (as defined herein) with at least one of the amino acid sequences of SEQ ID NO□s: 1316 to 1476, and SEQ ID NO: 1485, 1486, and 1487 (see Table 1).

[0356] Another preferred, but non-limiting aspect of the invention relates to humanized variants of the Nanobodies of SEQ ID NO□s: 1316 to 1476, and SEQ ID NO: 1485, 1486, and 1487 (see Table 1), that comprise, compared to the corresponding native V_{HH} sequence, at least one humanizing substitution (as defined herein), and in particular at least one humanizing substitution in at least one of its framework sequences (as defined herein).

[0357] The polypeptides of the invention comprise or essentially consist of at least one Nanobody of the invention.

[0358] It will be clear to the skilled person that the Nanobodies that are mentioned herein as □preferred□ (or □more preferred□, □even more preferred□, etc.) are also pre [symbol] preferred, or even more preferred, etc.) for use in the polypeptides described herein. Thus, polypeptides that comprise or essentially consist of one or more □preferred□ Nanobodies of the invention will generally be preferred, and polypeptides that comprise or essentially consist of one or more □more preferred□ Nanobodies of the invention will generally be more preferred, etc.

[0359] Generally, proteins or polypeptides that comprise or essentially consist of a single Nanobody (such as a single Nanobody of the invention) will be referred to herein as □monovalent□ proteins or polypeptides or as □monovalent constructs□. Proteins and polypeptides that comprise or essentially consist of two or more Nanobodies (such as at least two Nanobodies of the invention or at least one Nanobody of the invention and at least one other Nanobody) will be referred to herein as □multivalent□ proteins or polypeptides or multivalent constructs□, and these may provide certain advantages compared to the corresponding monovalent Nanobodies of the invention. Some non-limiting examples of such multivalent constructs will become clear from the further description herein.

[0360] According to one specific, but non-limiting aspect, a polypeptide of the invention comprises or essentially consists of at least two Nanobodies of the invention, such as two or three Nanobodies of the invention. As further described herein, such multivalent constructs can provide certain advantages compared to a protein or polypeptide comprising or essentially consisting of a single Nanobody of the invention, such as a much improved avidity for Integrins. Such multivalent constructs will be clear to the skilled person based on the disclosure herein.

[0361] According to another specific, but non-limiting aspect, a polypeptide of the invention comprises or essentially consists of at least one Nanobody of the invention and at least one other binding unit (i.e. directed against another epitope, antigen, target, protein or polypeptide), which is preferably also a Nanobody. Such proteins or polypeptides are also referred to herein as □multispecific□ proteins or polypeptides or as □multispecific constructs and these may provide certain advantages compared to the corresponding monovalent Nanobodies of the invention (as will become clear from the further discussion herein of some preferred, but-nonlimiting multispecific constructs). Such multispecific constructs will be clear to the skilled person based on the disclosure herein.

[0362] According to yet another specific, but non-limiting aspect, a polypeptide of the invention comprises or essentially consists of at least one Nanobody of the invention, optionally one or more further Nanobodies, and at least one other amino acid sequence (such as a protein or polypeptide) that confers at least one desired property to the Nanobody of the invention and/or to the resulting fusion protein. Again, such fusion proteins may provide certain advantages compared to the corresponding monovalent Nanobodies of the invention. Some non-limiting examples of such amino acid sequences and of such fusion constructs will become clear from the further description herein.

[0363] It is also possible to combine two or more of the above aspects, for example to provide a trivalent bispecific construct comprising two Nanobodies of the invention and one other Nanobody, and optionally one or more other amino acid sequences. Further non-limiting examples of such constructs, as well as some constructs that are particularly preferred within the context of the present invention, will become clear from the further description herein. In the above constructs, the one or more Nanobodies and/or other amino acid sequences may be directly linked to each other and/or suitably linked to each other via one or more linker sequences. Some suitable but non-limiting examples of such linkers will become clear from the further description herein.

[0364] In one specific aspect of the invention, a Nanobody of the invention or a compound, construct or polypeptide of the invention comprising at least one Nanobody of the invention may have an increased half-life, compared to the corresponding amino acid sequence of the invention. Some preferred, but non-limiting examples of such Nanobodies, compounds and polypeptides will become clear to the skilled person based on the further disclosure herein, and for example comprise Nanobodies sequences or polypeptides of the invention that have been chemically modified to increase the half-life thereof (for example, by means of pegylation); amino acid sequences of the invention that comprise at least one additional binding site for binding to a serum protein (such as serum albumin, see for example EP 0 368 684 B1, page 4); or polypeptides of the invention that comprise at least one Nanobody of the invention that is linked to at least one moiety (and in particular at least one amino acid sequence) that increases the half-life of the Nanobody of the invention. Examples of polypeptides of the invention that comprise such half-life extending moieties or amino acid sequences will become clear to the skilled person based on the further disclosure herein; and for example include, without limitation, polypeptides in which the one or more Nanobodies of the invention are suitable linked to one or more serum proteins or fragments thereof (such as serum albumin or suitable fragments thereof) or to one or more binding units that can bind to serum proteins (such as, for example, Nanobodies or (single) domain antibodies that can bind to serum proteins such as serum albumin, serum immunoglobulins such as IgG, or transferrine); polypeptides in which a Nanobody of the invention is linked to an Fc portion (such as a human Fc) or a suitable part or fragment thereof; or polypeptides in which the one or more Nanobodies of the invention are suitable linked to one or more small proteins or peptides that can bind to serum proteins (such as, without limitation, the proteins and peptides described in WO 91/01743, WO 01/45746, WO 02/076489 and to the US provisional application of Ablynx N.V. entitled “Peptides capable of binding to serum proteins” of Ablynx N.V. filed on Dec. 5, 2006 (see also PCT/EP/2007/063348). Again, as will be clear to the skilled person, such Nanobodies, compounds, constructs or polypeptides may contain one or more additional groups, residues, moieties or binding units, such as one or more further amino acid sequences and in particular one or more additional Nanobodies (i.e. not directed against Integrins), so as to provide a tri- of multispecific Nanobody construct.

[0365] Generally, the Nanobodies of the invention (or compounds, constructs or polypeptides comprising the same) with increased half-life preferably have a half-life that is at least 1.5 times, preferably at least 2 times, such as at least 5 times, for example at least 10 times or more than 20 times, greater than the half-life of the corresponding amino acid sequence of the invention per se. For example, the Nanobodies, compounds, constructs or polypeptides of the invention with increased half-life may have a half-life that is increased with more than 1 hours, preferably more than 2 hours, more preferably more than 6 hours, such as more than 12 hours, or even more than 24, 48 or 72 hours, compared to the corresponding amino acid sequence of the invention per se.

[0366] In a preferred, but non-limiting aspect of the invention, such Nanobodies, compound, constructs or polypeptides of the invention exhibit a serum half-life in human of at least about 12 hours, preferably at least 24 hours, more preferably at least 48 hours, even more preferably at least 72 hours or more. For example, compounds or polypeptides of the invention may have a half-life of at least 5 days (such as about 5 to 10 days), preferably at least 9 days (such as about 9 to 14 days), more preferably at least about 10 days (such as about 10 to 15 days), or at least about 11 days (such as about 11 to 16 days), more preferably at least about 12 days (such as about 12 to 18 days or more), or more than 14 days (such as about 14 to 19 days).

[0367] In another one aspect of the invention, a polypeptide of the invention comprises one or more (such as two or preferably one) Nanobodies of the invention linked (optionally via one or more suitable linker sequences) to one or more (such as two and preferably one) amino acid sequences that allow the resulting polypeptide of the invention to cross the blood brain barrier. In particular, said one or more amino acid sequences that allow the resulting polypeptides of the invention to cross the blood brain barrier may be one or more (such as two and preferably one) Nanobodies, such as the Nanobodies described in WO 02/057445, of which FC44 (SEQ ID NO: 189 of WO 06/040153) and FC5 (SEQ ID NO: 190 of WO 06/040154) are preferred examples.

[0368] In particular, polypeptides comprising one or more Nanobodies of the invention are preferably such that they:
[0369] bind to Integrins with a dissociation constant (K_{D}) of 10⁻⁵ to 10⁻¹² moles/liter or less, and preferably 10⁻⁷ to 10⁻¹² moles/liter or less and more preferably 10⁻⁸ to 10⁻¹² moles/liter (i.e. with an association constant (K_{A}) of 10⁵ to 10¹² liter/moles or more, and preferably 10⁷ to 10¹² liter/moles or more and more preferably 10⁸ to 10¹² liter/moles);
   and/or such that they:
[0370] bind to Integrins with a kₒₙ-rate of between 10² M⁻¹s⁻¹ to about 10⁷ M⁻¹s⁻¹, preferably between 10³ M¹s⁻¹ and 10⁷ M⁻¹s⁻¹, more preferably between 10⁴ M⁻¹s¹ and 10⁷ M⁻¹s⁻¹, such as between 10⁵ M⁻¹s⁻¹ and 10⁷ M⁻¹s⁻¹;
   and/or such that they:
[0371] bind to Integrins with a k_{off} rate between 1 s⁻¹ (t_{1/2}=0.69 s) and 10⁻⁶ s¹ (providing a near irreversible complex with a t_{1/2} of multiple days), preferably between 10⁻² s⁻¹ and 10⁻⁶ s⁻¹, more preferably between 10⁻³ s⁻¹ and 10⁻⁶ s⁻¹, such as between 10⁻⁴ s⁻¹ and 10⁻⁶ s⁻¹.

[0372] Preferably, a polypeptide that contains only one amino acid sequence of the invention is preferably such that it will bind to Integrins with an affinity less than 500 nM, preferably less than 200 nM, more preferably less than 10 nM, such as less than 500 pM. In this respect, it will be clear to the skilled person that a polypeptide that contains two or more Nanobodies of the invention may bind to Integrins with an increased avidity, compared to a polypeptide that contains only one amino acid sequence of the invention.

[0373] Some preferred IC₅₀ values for binding of the amino acid sequences or polypeptides of the invention to Integrins will become clear from the further description and examples herein.

[0374] Other polypeptides according to this preferred aspect of the invention may for example be chosen from the group consisting of amino acid sequences that have more than 80%, preferably more than 90%, more preferably more than 95%, such as 99% or more □sequence identity □ (as defined herein) with [symbol] the amino acid sequences of SEQ ID NO□s: [polypeptides of the invention] (see Table 3), in which the Nanobodies comprised within said amino acid sequences are preferably as further defined herein.

[0375] Another aspect of this invention relates to a nucleic acid that encodes an amino acid sequence of the invention (such as a Nanobody of the invention) or a polypeptide of the invention comprising the same. Again, as generally described herein for the nucleic acids of the invention, such a nucleic acid may be in the form of a genetic construct, as defined herein.

[0376] In another aspect, the invention relates to host or host cell that expresses or that is capable of expressing an amino acid sequence (such as a Nanobody) of the invention and/or a polypeptide of the invention comprising the same; and/or that contains a nucleic acid of the invention. Some preferred but non-limiting examples of such hosts or host cells will become clear from the further description herein.

[0377] Another aspect of the invention relates to a product or composition containing or comprising at least one amino acid sequence of the invention, at least one polypeptide of the invention and/or at least one nucleic acid of the invention, and optionally one or more further components of such compositions known per se, i.e. depending on the intended use of the composition. Such a product or composition may for example be a pharmaceutical composition (as described herein), a veterinary composition or a product or composition for diagnostic use (as also described herein). Some preferred but non-limiting examples of such products or compositions will become clear from the further description herein.

[0378] The invention further relates to methods for preparing or generating the amino acid sequences, compounds, constructs, polypeptides, nucleic acids, host cells, products and compositions described herein. Some preferred but non-limiting examples of such methods will become clear from the further description herein.

[0379] The invention further relates to applications and uses of the amino acid sequences, compounds, constructs, polypeptides, nucleic acids, host cells, products and compositions described herein, as well as to methods for the prevention and/or treatment for diseases and disorders associated with Integrins. Some preferred but non-limiting applications and uses will become clear from the further description herein.

[0380] Other aspects, embodiments, advantages and applications of the invention will also become clear from the further description hereinbelow.

[0381] Generally, it should be noted that the term Nanobody as used herein in its broadest sense is not limited to a specific biological source or to a specific method of preparation. For example, as will be discussed in more detail below, the Nanobodies of the invention can generally be obtained by any of the techniques (1) to (8) mentioned on pages 61 and 62 of WO 08/020,079, or any other suitable technique known per se. One preferred class of Nanobodies corresponds to the V_{HH} domains of naturally occurring heavy chain antibodies directed against Integrins. As further described herein, such V_{HH} sequences can generally be generated or obtained by suitably immunizing a species of Camelid with Integrins (i.e. so as to raise an immune response and/or heavy chain antibodies directed against Integrins), by obtaining a suitable biological sample from said Camelid (such as a blood sample, serum sample or sample of B-cells), and by generating V_{HH} sequences directed against Integrins, starting from said sample, using any suitable technique known per se. Such techniques will be clear to the skilled person and/or are further described herein.

[0382] Alternatively, such naturally occurring V_{HH} domains against Integrins, can be obtained from naïve libraries of Camelid V_{HH} sequences, for example by screening such a library using Integrins, or at least one part, fragment, antigenic determinant or epitope thereof using one or more screening techniques known per se. Such libraries and techniques are for example described in WO 99/37681, WO 01/90190, WO 03/025020 and WO 03/035694. Alternatively, improved synthetic or semi-synthetic libraries derived from naïve Vim libraries may be used, such as V_{HH} libraries obtained from naïve V_{HH} libraries by techniques such as random mutagenesis and/or CDR shuffling, as for example described in WO 00/43507.

[0383] Thus, in another aspect, the invention relates to a method for generating Nanobodies, that are directed against Integrins. In one aspect, said method at least comprises the steps of:
[0384] a) providing a set, collection or library of Nanobody sequences; and
[0385] b) screening said set, collection or library of Nanobody sequences for Nanobody sequences that can bind to and/or have affinity for Integrins;
   and
[0386] c) isolating the amino acid sequence(s) that can bind to and/or have affinity for Integrins.

[0387] In such a method, the set, collection or library of Nanobody sequences may be a naïve set, collection or library of Nanobody sequences; a synthetic or semi-synthetic set, collection or library of Nanobody sequences; and/or a set, collection or library of Nanobody sequences that have been subjected to affinity maturation.

[0388] In a preferred aspect of this method, the set, collection or library of Nanobody sequences may be an immune set, collection or library of Nanobody sequences, and in particular an immune set, collection or library of V_{HH} sequences, that have been derived from a species of Camelid that has been suitably immunized with Integrins or with a suitable antigenic determinant based thereon or derived therefrom, such as an antigenic part, fragment, region, domain, loop or other epitope thereof. In one particular aspect, said antigenic determinant may be an extracellular part, region, domain, loop or other extracellular epitope(s).

[0389] In the above methods, the set, collection or library of Nanobody or V_{HH} sequences may be displayed on a phage, phagemid, ribosome or suitable micro-organism (such as yeast), such as to facilitate screening. Suitable methods, techniques and host organisms for displaying and screening (a set, collection or library of) Nanobody sequences will be clear to the person skilled in the art, for example on the basis of the further disclosure herein. Reference is also made toWO 03/054016 and to the review by Hoogenboom in Nature Biotechnology, 23, 9, 1105-1116 (2005).

[0390] In another aspect, the method for generating Nanobody sequences comprises at least the steps of:
[0391] a) providing a collection or sample of cells derived from a species of Camelid that express immunoglobulin sequences;
[0392] b) screening said collection or sample of cells for (i) cells that express an immunoglobulin sequence that can bind to and/or have affinity for Integrins; and (ii) cells that express heavy chain antibodies, in which substeps (i) and (ii) can be performed essentially as a single screening step or in any suitable order as two separate screening steps, so as to provide at least one cell that expresses a heavy chain antibody that can bind to and/or has affinity for Integrins;
   and
[0393] c) either (i) isolating from said cell the V_{HH} sequence present in said heavy chain antibody; or (ii) isolating from said cell a nucleic acid sequence that encodes the V_{HH} sequence present in said heavy chain antibody, followed by expressing said V_{HH} domain.

[0394] In the method according to this aspect, the collection or sample of cells may for example be a collection or sample of B-cells. Also, in this method, the sample of cells may be derived from a Camelid that has been suitably immunized with Integrins or a suitable antigenic determinant based thereon or derived therefrom, such as an antigenic part, fragment, region, domain, loop or other epitope thereof. In one particular aspect, said antigenic determinant may be an extracellular part, region, domain, loop or other extracellular epitope(s).

[0395] The above method may be performed in any suitable manner, as will be clear to the skilled person. Reference is for example made to EP 0 542 810, WO 05/19824, WO 04/051268 and WO 04/106377. The screening of step b) is preferably performed using a flow cytometry technique such as FACS. For this, reference is for example made to Lieby et al., Blood, Vol. 97, No. 12, 3820. Particular reference is made to the so-called □Nanoclone™ technique described in International application WO 06/079372 by Ablynx N.V.

[0396] In another aspect, the method for generating an amino acid sequence directed against Integrins may comprise at least the steps of:
[0397] a) providing a set, collection or library of nucleic acid sequences encoding heavy chain antibodies or Nanobody sequences;
[0398] b) screening said set, collection or library of nucleic acid sequences for nucleic acid sequences that encode a heavy chain antibody or a Nanobody sequence that can bind to and/or has affinity for Integrins;
   and
[0399] c) isolating said nucleic acid sequence, followed by expressing the V_{HH} sequence present in said heavy chain antibody or by expressing said Nanobody sequence, respectively.

[0400] In such a method, the set, collection or library of nucleic acid sequences encoding heavy chain antibodies or Nanobody sequences may for example be a set, collection or library of nucleic acid sequences encoding a naïve set, collection or library of heavy chain antibodies or V_{HH} sequences; a set, collection or library of nucleic acid sequences encoding a synthetic or semi-synthetic set, collection or library of Nanobody sequences; and/or a set, collection or library of nucleic acid sequences encoding a set, collection or library of Nanobody sequences that have been subjected to affinity maturation.

[0401] In a preferred aspect of this method, the set, collection or library of amino acid sequences may be an immune set, collection or library of nucleic acid sequences encoding heavy chain antibodies or VHH sequences derived from a Camelid that has been suitably immunized with Integrins or with a suitable antigenic determinant based thereon or derived therefrom, such as an antigenic part, fragment, region, domain, loop or other epitope thereof. In one particular aspect, said antigenic determinant may be an extracellular part, region, domain, loop or other extracellular epitope(s).

[0402] In the above methods, the set, collection or library of nucleotide sequences may be displayed on a phage, phagemid, ribosome or suitable micro-organism (such as yeast), such as to facilitate screening. Suitable methods, techniques and host organisms for displaying and screening (a set, collection or library of) nucleotide sequences encoding amino acid sequences will be clear to the person skilled in the art, for example on the basis of the further disclosure herein. Reference is also made to WO 03/054016 and to the review by Hoogenboom in Nature Biotechnology, 23, 9, 1105-1116 (2005).

[0403] As will be clear to the skilled person, the screening step of the methods described herein can also be performed as a selection step. Accordingly the term □screening□ as used in the present description can comprise selection, screening or any suitable combination of selection and/or screening techniques. Also, when a set, collection or library of sequences is used, it may contain any suitable number of sequences, such as 1, 2, 3 or about 5, 10, 50, 100, 500, 1000, 5000, 10⁴, 10⁵, 10⁶, 10⁷, 10⁸ or more sequences.

[0404] Also, one or more or all of the sequences in the above set, collection or library of amino acid sequences may be obtained or defined by rational, or semi-empirical approaches such as computer modelling techniques or biostatics or datamining techniques.

[0405] Furthermore, such a set, collection or library can comprise one, two or more sequences that are variants from one another (e.g. with designed point mutations or with randomized positions), compromise multiple sequences derived from a diverse set of naturally diversified sequences (e.g. an immune library)), or any other source of diverse sequences (as described for example in Hoogenboom et al, Nat Biotechnol 23:1105, 2005 and Binz et al, Nat Biotechnol 2005, 23:1247). Such set, collection or library of sequences can be displayed on the surface of a phage particle, a ribosome, a bacterium, a yeast cell, a mammalian cell, and linked to the nucleotide sequence encoding the amino acid sequence within these carriers. This makes such set, collection or library amenable to selection procedures to isolate the desired amino acid sequences of the invention. More generally, when a sequence is displayed on a suitable host or host cell, it is also possible (and customary) to first isolate from said host or host cell a nucleotide sequence that encodes the desired sequence, and then to obtain the desired sequence by suitably expressing said nucleotide sequence in a suitable host organism. Again, this can be performed in any suitable manner known per se, as will be clear to the skilled person.

[0406] Yet another technique for obtaining V_{HH} sequences or Nanobody sequences directed against Integrins involves suitably immunizing a transgenic mammal that is capable of expressing heavy chain antibodies (i.e. so as to raise an immune response and/or heavy chain antibodies directed against Integrins), obtaining a suitable biological sample from said transgenic mammal that contains (nucleic acid sequences encoding) said VHH sequences or

[0407] Nanobody sequences (such as a blood sample, serum sample or sample of B-cells), and then generating V_{HH} sequences directed against Integrins, starting from said sample, using any suitable technique known per se (such as any of the methods described herein or a hybridoma technique). For example, for this purpose, the heavy chain antibody-expressing mice and the further methods and techniques described in WO 02/085945, WO 04/049794 and WO 06/008548 and Janssens et al., Proc. Natl. Acad. Sci. USA. 2006 Oct. 10; 103(41):15130-5 can be used. For example, such heavy chain antibody expressing mice can express heavy chain antibodies with any suitable (single) variable domain, such as (single) variable domains from natural sources (e.g. human (single) variable domains, Camelid (single) variable domains or shark (single) variable domains), as well as for example synthetic or semi-synthetic (single) variable domains.

[0408] The invention also relates to the V_{HH} sequences or Nanobody sequences that are obtained by the above methods, or alternatively by a method that comprises the one of the above methods and in addition at least the steps of determining the nucleotide sequence or amino acid sequence of said V_{HH} sequence or Nanobody sequence; and of expressing or synthesizing said Vim sequence or Nanobody sequence in a manner known per se, such as by expression in a suitable host cell or host organism or by chemical synthesis.

[0409] As mentioned herein, a particularly preferred class of Nanobodies of the invention comprises Nanobodies with an amino acid sequence that corresponds to the amino acid sequence of a naturally occurring V_{HH} domain, but that has been □humanized□, i.e. by replacing one or more amino acid residues in the amino acid sequence of said naturally occurring V_{HH} sequence (and in particular in the framework sequences) by one or more of the amino acid residues that occur at the corresponding position(s) in a V_{H} domain from a conventional 4-chain antibody from a human being (e.g. indicated above), as further described on, and using the techniques mentioned on, page 63 of WO 08/020,079. Another particularly preferred class of Nanobodies of the invention comprises Nanobodies with an amino acid sequence that corresponds to the amino acid sequence of a naturally occurring V_{H} domain, but that has been □camelized□, i.e. by replacing one or more amino acid residues in the amino acid sequence of a naturally occurring V_{H} domain from a conventional 4-chain antibody by one or more of the amino acid residues that occur at the corresponding position(s) in a V_{HH} domain of a heavy chain antibody, as further described on, and using the techniques mentioned on, page 63 of WO 08/020,079. Other suitable methods and techniques for obtaining the Nanobodies of the invention and/or nucleic acids encoding the same, starting from naturally occurring V_{H} sequences or preferably V_{HH} sequences, will be clear from the skilled person, and may for example include the techniques that are mentioned on page 64 of WO 08/00279As mentioned herein, Nanobodies may in particular be characterized by the presence of one or more □Hallmark residues□ (as described herein) in one or more of the framework sequences.

[0410] Thus, according to one preferred, but non-limiting aspect of the invention, a Nanobody in its broadest sense can be generally defined as a polypeptide comprising:
[0411] a) an amino acid sequence that is comprised of four framework regions/sequences interrupted by three complementarity determining regions/sequences, in which the amino acid residue at position 108 according to the Kabat numbering is Q;
   and/or:
[0412] b) an amino acid sequence that is comprised of four framework regions/sequences interrupted by three complementarity determining regions/sequences, in which the amino acid residue at position 45 according to the Kabat numbering is a charged amino acid (as defined herein) or a cysteine residue, and position 44 is preferably an E;
   and/or:
[0413] c) an amino acid sequence that is comprised of four framework regions/sequences interrupted by three complementarity determining regions/sequences, in which the amino acid residue at position 103 according to the Kabat numbering is chosen from the group consisting of P, R and S, and is in particular chosen from the group consisting of R and S.

[0414] Thus, in a first preferred, but non-limiting aspect, a Nanobody of the invention may have the structure
[0415] FR1-CDR1-FR2-CDR2-FR3-CDR3-FR4
   in which FR1 to FR4 refer to framework regions 1 to 4, respectively, and in which CDR1 to CDR3 refer to the complementarity determining regions 1 to 3, respectively, and in which
[0416] a) the amino acid residue at position 108 according to the Kabat numbering is Q;
   and/or in which:
[0417] b) the amino acid residue at position 45 according to the Kabat numbering is a charged amino acid or a cysteine and the amino acid residue at position 44 according to the Kabat numbering is preferably E;
   and/or in which:
[0418] c) the amino acid residue at position 103 according to the Kabat numbering is chosen from the group consisting of P, R and S, and is in particular chosen from the group consisting of R and S;
   and in which:
[0419] d) CDR1, CDR2 and CDR3 are as defined herein, and are preferably as defined according to one of the preferred aspects herein, and are more preferably as defined according to one of the more preferred aspects herein.

[0420] In particular, a Nanobody in its broadest sense can be generally defined as a polypeptide comprising:
[0421] a) an amino acid sequence that is comprised of four framework regions/sequences interrupted by three complementarity determining regions/sequences, in which the amino acid residue at position 108 according to the Kabat numbering is Q;
   and/or:
[0422] b) an amino acid sequence that is comprised of four framework regions/sequences interrupted by three complementarity determining regions/sequences, in which the amino acid residue at position 44 according to the Kabat numbering is E and in which the amino acid residue at position 45 according to the Kabat numbering is an R;
   and/or:
[0423] c) an amino acid sequence that is comprised of four framework regions/sequences interrupted by three complementarity determining regions/sequences, in which the amino acid residue at position 103 according to the Kabat numbering is chosen from the group consisting of P, R and S, and is in particular chosen from the group consisting of R and S.

[0424] Thus, according to a preferred, but non-limiting aspect, a Nanobody of the invention may have the structure
[0425] FR1-CDR1-FR2-CDR2-FR3-CDR3-FR4
   in which FR1 to FR4 refer to framework regions 1 to 4, respectively, and in which CDR1 to CDR3 refer to the complementarity determining regions 1 to 3, respectively, and in which
[0426] a) the amino acid residue at position 108 according to the Kabat numbering is Q;
   and/or in which:
[0427] b) the amino acid residue at position 44 according to the Kabat numbering is E and in which the amino acid residue at position 45 according to the Kabat numbering is an R;
   and/or in which:
[0428] c) the amino acid residue at position 103 according to the Kabat numbering is chosen from the group consisting of P, R and S, and is in particular chosen from the group consisting of R and S;
   and in which:
[0429] d) CDR1, CDR2 and CDR3 are as defined herein, and are preferably as defined according to one of the preferred aspects herein, and are more preferably as defined according to one of the more preferred aspects herein.

[0430] In particular, a Nanobody against Integrins according to the invention may have the structure:
[0431] FR1-CDR1-FR2-CDR2-FR3-CDR3-FR4
   in which FR1 to FR4 refer to framework regions 1 to 4, respectively, and in which CDR1 to CDR3 refer to the complementarity determining regions 1 to 3, respectively, and in which
[0432] a) the amino acid residue at position 108 according to the Kabat numbering is Q;
   and/or in which:
[0433] b) the amino acid residue at position 44 according to the Kabat numbering is E and in which the amino acid residue at position 45 according to the Kabat numbering is an R;
   and/or in which:
[0434] c) the amino acid residue at position 103 according to the Kabat numbering is chosen from the group consisting of P, R and S, and is in particular chosen from the group consisting of R and S;
   and in which:
[0435] d) CDR1, CDR2 and CDR3 are as defined herein, and are preferably as defined according to one of the preferred aspects herein, and are more preferably as defined according to one of the more preferred aspects herein.

[0436] In particular, according to one preferred, but non-limiting aspect of the invention, a Nanobody can generally be defined as a polypeptide comprising an amino acid sequence that is comprised of four framework regions/sequences interrupted by three complementarity determining regions/sequences, in which;
[0437] a-1) the amino acid residue at position 44 according to the Kabat numbering is chosen from the group consisting of A, G, E, D, G, Q, R, S, L; and is preferably chosen from the group consisting of G, E or Q; and
[0438] a-2) the amino acid residue at position 45 according to the Kabat numbering is chosen from the group consisting of L, R or C; and is preferably chosen from the group consisting of L or R; and
[0439] a-3) the amino acid residue at position 103 according to the Kabat numbering is chosen from the group consisting of W, R or S; and is preferably W or R, and is most preferably W;
[0440] a-4) the amino acid residue at position 108 according to the Kabat numbering is Q;
   or in which:
[0441] b-1) the amino acid residue at position 44 according to the Kabat numbering is chosen from the group consisting of E and Q; and
[0442] b-2) the amino acid residue at position 45 according to the Kabat numbering is R; and
[0443] b-3) the amino acid residue at position 103 according to the Kabat numbering is chosen from the group consisting of W, R and S; and is preferably W;
[0444] b-4) the amino acid residue at position 108 according to the Kabat numbering is chosen from the group consisting of Q and L; and is preferably Q;
   or in which:
[0445] c-1) the amino acid residue at position 44 according to the Kabat numbering is chosen from the group consisting of A, G, E, D, Q, R, S and L; and is preferably chosen from the group consisting of G, E and Q; and
[0446] c-2) the amino acid residue at position 45 according to the Kabat numbering is chosen from the group consisting of L, R and C; and is preferably chosen from the group consisting of L and R; and
[0447] c-3) the amino acid residue at position 103 according to the Kabat numbering is chosen from the group consisting of P, R and S; and is in particular chosen from the group consisting of R and S; and
[0448] c-4) the amino acid residue at position 108 according to the Kabat numbering is chosen from the group consisting of Q and L; is preferably Q;
   and in which
[0449] d) CDR1, CDR2 and CDR3 are as defined herein, and are preferably as defined according to one of the preferred aspects herein, and are more preferably as defined according to one of the more preferred aspects herein.

[0450] Thus, in another preferred, but non-limiting aspect, a Nanobody of the invention may have the structure
[0451] FR1-CDR1-FR2-CDR2-FR3-CDR3-FR4
   in which FR1 to FR4 refer to framework regions 1 to 4, respectively, and in which CDR1 to CDR3 refer to the complementarity determining regions 1 to 3, respectively, and in which:
[0452] a-1) the amino acid residue at position 44 according to the Kabat numbering is chosen from the group consisting of A, G, E, D, G, Q, R, S, L; and is preferably chosen from the group consisting of G, E or Q; and in which:
[0453] a-2) the amino acid residue at position 45 according to the Kabat numbering is chosen from the group consisting of L, R or C; and is preferably chosen from the group consisting of L or R;
   and in which:
[0454] a-3) the amino acid residue at position 103 according to the Kabat numbering is chosen from the group consisting of W, R or S; and is preferably W or R, and is most preferably W;
   and in which
[0455] a-4) the amino acid residue at position 108 according to the Kabat numbering is Q;
   and in which:
[0456] d) CDR1, CDR2 and CDR3 are as defined herein, and are preferably as defined according to one of the preferred aspects herein, and are more preferably as defined according to one of the more preferred aspects herein.

[0457] In another preferred, but non-limiting aspect, a Nanobody of the invention may have the structure
[0458] FR1-CDR1-FR2-CDR2-FR3-CDR3-FR4
   in which FR1 to FR4 refer to framework regions 1 to 4, respectively, and in which CDR1 to CDR3 refer to the complementarity determining regions 1 to 3, respectively, and in which:
[0459] b-1) the amino acid residue at position 44 according to the Kabat numbering is chosen from the group consisting of E and Q;
   and in which:
[0460] b-2) the amino acid residue at position 45 according to the Kabat numbering is R;
   and in which:
[0461] b-3) the amino acid residue at position 103 according to the Kabat numbering is chosen from the group consisting of W, R and S; and is preferably W;
   and in which:
[0462] b-4) the amino acid residue at position 108 according to the Kabat numbering is chosen from the group consisting of Q and L; and is preferably Q;
   and in which:
[0463] d) CDR1, CDR2 and CDR3 are as defined herein, and are preferably as defined according to one of the preferred aspects herein, and are more preferably as defined according to one of the more preferred aspects herein.

[0464] In another preferred, but non-limiting aspect, a Nanobody of the invention may have the structure
[0465] FR1-CDR1-FR2-CDR2-FR3-CDR3-FR4
   in which FR1 to FR4 refer to framework regions 1 to 4, respectively, and in which CDR1 to CDR3 refer to the complementarity determining regions 1 to 3, respectively, and in which:
[0466] c-1) the amino acid residue at position 44 according to the Kabat numbering is chosen from the group consisting of A, G, E, D, Q, R, S and L; and is preferably chosen from the group consisting of G, E and Q;
   and in which:
[0467] c-2) the amino acid residue at position 45 according to the Kabat numbering is chosen from the group consisting of L, R and C; and is preferably chosen from the group consisting of L and R;
   and in which:
[0468] c-3) the amino acid residue at position 103 according to the Kabat numbering is chosen from the group consisting of P, R and S; and is in particular chosen from the group consisting of R and S;
   and in which:
[0469] c-4) the amino acid residue at position 108 according to the Kabat numbering is chosen from the group consisting of Q and L; is preferably Q;
   and in which:
[0470] d) CDR1, CDR2 and CDR3 are as defined herein, and are preferably as defined according to one of the preferred aspects herein, and are more preferably as defined according to one of the more preferred aspects herein.

[0471] Two particularly preferred, but non-limiting groups of the Nanobodies of the invention are those according to a) above; according to (a-1) to (a-4) above; according to b) above; according to (b-1) to (b-4) above; according to (c) above; and/or according to (c-1) to (c-4) above, in which either:
[0472] i) the amino acid residues at positions 44-47 according to the Kabat numbering form the sequence GLEW (or a GLEW-like sequence as described herein) and the amino acid residue at position 108 is Q;
   or in which:
[0473] ii) the amino acid residues at positions 43-46 according to the Kabat numbering form the sequence KERE or KQRE (or a KERE-like sequence as described) and the amino acid residue at position 108 is Q or L, and is preferably Q.

[0474] Thus, in another preferred, but non-limiting aspect, a Nanobody of the invention may have the structure
[0475] FR1-CDR1-FR2-CDR2-FR3-CDR3-FR4
   in which FR1 to FR4 refer to framework regions 1 to 4, respectively, and in which CDR1 to CDR3 refer to the complementarity determining regions 1 to 3, respectively, and in which:
[0476] i) the amino acid residues at positions 44-47 according to the Kabat numbering form the sequence GLEW (or a GLEW-like sequence as defined herein) and the amino acid residue at position 108 is Q;
   and in which:
[0477] ii) CDR1, CDR2 and CDR3 are as defined herein, and are preferably as defined according to one of the preferred aspects herein, and are more preferably as defined according to one of the more preferred aspects herein.

[0478] In another preferred, but non-limiting aspect, a Nanobody of the invention may have the structure
[0479] FR1-CDR1-FR2-CDR2-FR3-CDR3-FR4
   in which FR1 to FR4 refer to framework regions 1 to 4, respectively, and in which CDR1 to CDR3 refer to the complementarity determining regions 1 to 3, respectively, and in which:
[0480] i) the amino acid residues at positions 43-46 according to the Kabat numbering form the sequence KERE or KQRE (or a KERE-like sequence) and the amino acid residue at position 108 is Q or L, and is preferably Q;
   and in which:
[0481] ii) CDR1, CDR2 and CDR3 are as defined herein, and are preferably as defined according to one of the preferred aspects herein, and are more preferably as defined according to one of the more preferred aspects herein.

[0482] In the Nanobodies of the invention in which the amino acid residues at positions 43-46 according to the Kabat numbering form the sequence KERE or KQRE, the amino acid residue at position 37 is most preferably F. In the Nanobodies of the invention in which the amino acid residues at positions 44-47 according to the Kabat numbering form the sequence GLEW, the amino acid residue at position 37 is chosen from the group consisting of Y, H, I, L, V or F, and is most preferably V.

[0483] Thus, without being limited hereto in any way, on the basis of the amino acid residues present on the positions mentioned above, the Nanobodies of the invention can generally be classified on the basis of the following three groups:
[0484] i) The □GELEW-group□: Nanobodies with the amino acid sequence GLEW at positions 44 47 according to the Kabat numbering and Q at position 108 according to the Kabat numbering. As further described herein, Nanobodies within this group usually have a V at position 37, and can have a W, P, R or S at position 103, and preferably have a W at position 103. The GLEW group also comprises some GLEW-like sequences such as those mentioned in Table A-3 below. More generally, and without limitation, Nanobodies belonging to the GLEW-group can be defined as Nanobodies with a G at position 44 and/or with a W at position 47, in which position 46 is usually E and in which preferably position 45 is not a charged amino acid residue and not cysteine;
[0485] ii) The □KERE-group□: Nanobodies with the amino acid sequence KERE or KQRE (or another KERE-like sequence) at positions 43-46 according to the Kabat numbering and Q or L at position 108 according to the Kabat numbering. As further described herein, Nanobodies within this group usually have a F at position 37, an L or F at position 47; and can have a W, P, R or S at position 103, and preferably have a W at position 103. More generally, and without limitation, Nanobodies belonging to the KERE-group can be defined as Nanobodies with a K, Q or R at position 44 (usually K) in which position 45 is a charged amino acid residue or cysteine, and position 47 is as further defined herein;
[0486] iii) The □103 P, R, S-group□: Nanobodies with a P, R or S at position 103. These

[0487] Nanobodies can have either the amino acid sequence GLEW at positions 44-47 according to the Kabat numbering or the amino acid sequence KERE or KQRE at positions 43-46 according to the Kabat numbering, the latter most preferably in combination with an F at position 37 and an L or an F at position 47 (as defined for the KERE-group); and can have Q or L at position 108 according to the Kabat numbering, and preferably have Q.

[0488] Also, where appropriate, Nanobodies may belong to (i.e. have characteristics of) two or more of these classes. For example, one specifically preferred group of Nanobodies has GLEW or a GLEW-like sequence at positions 44-47; P, R or S (and in particular R) at position 103; and Q at position 108 (which may be humanized to L).

[0489] More generally, it should be noted that the definitions referred to above describe and apply to Nanobodies in the form of a native (i.e. non-humanized) V_{HH} sequence, and that humanized variants of these Nanobodies may contain other amino acid residues than those indicated above (i.e. one or more humanizing substitutions as defined herein). For example, and without limitation, in some humanized Nanobodies of the GLEW-group or the 103 P, R, S-group, Q at position 108 may be humanized to 108 L. As already mentioned herein, other humanizing substitutions (and suitable combinations thereof) will become clear to the skilled person based on the disclosure herein. In addition, or alternatively, other potentially useful humanizing substitutions can be ascertained by comparing the sequence of the framework regions of a naturally occurring VHH sequence with the corresponding framework sequence of one or more closely related human V H sequences, after which one or more of the potentially useful humanizing substitutions (or combinations thereof) thus determined can be introduced into said V_{HH} sequence (in any manner known per se, as further described herein) and the resulting humanized V_{HH} sequences can be tested for affinity for the target, for stability, for ease and level of expression, and/or for other desired properties. In this way, by means of a limited degree of trial and error, other suitable humanizing substitutions (or suitable combinations thereof) can be determined by the skilled person based on the disclosure herein. Also, based on the foregoing, (the framework regions of) a Nanobody may be partially humanized or fully humanized.

[0490] Thus, in another preferred, but non-limiting aspect, a Nanobody of the invention may be a Nanobody belonging to the GLEW-group (as defined herein), and in which CDR1, CDR2 and CDR3 are as defined herein, and are preferably as defined according to one of the preferred aspects herein, and are more preferably as defined according to one of the more preferred aspects herein.

[0491] In another preferred, but non-limiting aspect, a Nanobody of the invention may be a Nanobody belonging to the KERE-group (as defined herein), and CDR1, CDR2 and CDR3 are as defined herein, and are preferably as defined according to one of the preferred aspects herein, and are more preferably as defined according to one of the more preferred aspects herein.

[0492] Thus, in another preferred, but non-limiting aspect, a Nanobody of the invention may be a Nanobody belonging to the 103 P, R, S-group (as defined herein), and in which CDR1, CDR2 and CDR3 are as defined herein, and are preferably as defined according to one of the preferred aspects herein, and are more preferably as defined according to one of the more preferred aspects herein.

[0493] Also, more generally and in addition to the 108Q, 43E/44R and 103 P,R,S residues mentioned above, the Nanobodies of the invention can contain, at one or more positions that in a conventional V_{H} domain would form (part of) the V_{H}/V_{L} interface, one or more amino acid residues that are more highly charged than the amino acid residues that naturally occur at the same position(s) in the corresponding naturally occurring V_{H} sequence, and in particular one or more charged amino acid residues (as mentioned in Table A-2). Such substitutions include, but are not limited to, the GLEW-like sequences mentioned in Table A-3 below; as well as the substitutions that are described in the International Application WO 00/29004 for so-called □microbodies□, e.g. so as to obtain a Nanobody with Q at position 108 in combination with KLEW at positions 44-47. Other possible substitutions at these positions will be clear to the skilled person based upon the disclosure herein.

[0494] In one aspect of the Nanobodies of the invention, the amino acid residue at position 83 is chosen from the group consisting of L, M, S, V and W; and is preferably L.

[0495] Also, in one aspect of the Nanobodies of the invention, the amino acid residue at position 83 is chosen from the group consisting of R, K, N, E, G, I, T and Q; and is most preferably either K or E (for Nanobodies corresponding to naturally occurring V_{HH} domains) or R (for □humanized□ Nanobodies, as described herein). The amino acid resi [symbol] pos 84 is chosen from the group consisting of P, A, R, S, D T, and V in one aspect, and is most preferably P (for Nanobodies corresponding to naturally occurring V_{HH} domains) or R (for □humanized□ Nanobodies, as described herein).

[0496] Furthermore, in one aspect of the Nanobodies of the invention, the amino acid residue at position 104 is chosen from the group consisting of G and D; and is most preferably G.

[0497] Collectively, the amino acid residues at positions 11, 37, 44, 45, 47, 83, 84, 103, 104 and 108, which in the Nanobodies are as mentioned above, will also be referred to herein as the □Hallmark Residues□. The Hallmark Residues and the amino acid residues at the corresponding positions of the most closely related human V_{H} domain, V_{H}3, are summarized in Table A-3.

[0498] Some especially preferred but non-limiting combinations of these Hallmark Residues as occur in naturally occurring VHH domains are mentioned in Table A-4. For comparison, the corresponding amino acid residues of the human V_{H}3 called DP-47 have been indicated in italics.

TABLE A-3
Hallmark Residues in Nanobodies

| Position | Human V_{H}3 | Hallmark Residues |
|---|---|---|
| 11 | L, V; | L, M, S, V, W; preferably L |
| | predominantly L | |
| 37 | V, I, F; usually V | F⁽¹⁾, Y, H, I, L or V, preferably |
| | | F⁽¹⁾ or Y |
| 44⁽⁸⁾ | G | G⁽²⁾, E⁽³⁾, A, D, Q, R, S, L; |
| | | preferably G⁽²⁾, E⁽³⁾ or Q; |
| | | most preferably G⁽²⁾ or E⁽³⁾. |
| 45⁽⁸⁾ | L | L⁽²⁾, R⁽³⁾, C, I, L, P, Q, V; |
| | | preferably L⁽²⁾ or R⁽³⁾ |
| 47⁽⁸⁾ | W, Y | W⁽²⁾, L⁽¹⁾ or F⁽¹⁾, A, G, I, M, R, S, V |
| | | or Y; preferably W⁽²⁾, L⁽¹⁾, F⁽¹⁾ or R |
| 83 | R or K; usually R | R, K⁽⁵⁾, N, E⁽⁵⁾, G, I, M, Q or T; |
| | | preferably K or R; most preferably K |
| 84 | A, T, D; | P⁽⁵⁾, A, L, R, S, T, D, V; preferably P |
| | predominantly A | |
| 103 | W | W⁽⁴⁾, P⁽⁶⁾, R⁽⁶⁾, S; preferably W |
| 104 | G | G or D; preferably G |
| 108 | L, M or T; | Q, L⁽⁷⁾ or R; preferably Q or L⁽⁷⁾ |
| | predominantly L | |

Notes:
⁽¹⁾In particular, but not exclusively, in combination with KERE or KQRE at positions 43-46.
⁽²⁾Usually as GLEW at positions 44-47.
⁽³⁾Usually as KERE or KQRE at positions 43-46, e.g. as KEREL, KEREF, KQREL, KQREF or KEREG at positions 43-47. Alternatively, also sequences such as TERE (for example TEREL), KECE (for example KECEL or KECER), RERE (for example REREG), QERE (for example QEREG), KGRE (for example KGREG), KDRE (for example KDREV) are possible. Some other possible, but less preferred sequences include for example DECKL and NVCEL.
⁽⁴⁾With both GLEW at positions 44-47 and KERE or KQRE at positions 43-46.
⁽⁵⁾Often as KP or EP at positions 83-84 of naturally occurring V_{HH} domains.
⁽⁶⁾In particular, but not exclusively, in combination with GLEW at positions 44-47.
⁽⁷⁾With the proviso that when positions 44-47 are GLEW, position 108 is always Q in (non-humanized) V_{HH} sequences that also contain a W at position 103.
⁽⁸⁾The GLEW group also contains GLEW-like sequences at positions 44-47, such as for example GVEW, EPEW, GLER, DQEW, DLEW, GIEW, ELEW, GPEW, EWLP, GPER, GLER and ELEW.

TABLE A-4
Some preferred but non-limiting combinations of
Hallmark Residues in naturally occurring Nanobodies.
For humanization of these combinations,
reference is made to the specification.

| | 11 | 37 | 44 | 45 | 47 | 83 | 84 | 103 | 104 | 108 |
|---|---|---|---|---|---|---|---|---|---|---|
| DP-47 (human) | M | V | G | L | W | R | A | W | G | L |
| □ KERE□ group | L | F | E | R | L | K | P | W | G | Q |
| | L | F | E | R | F | E | P | W | G | Q |
| | L | F | E | R | F | K | P | W | G | Q |
| | L | Y | Q | R | L | K | P | W | G | Q |
| | L | F | L | R | V | K | P | Q | G | Q |
| | L | F | Q | R | L | K | P | W | G | Q |
| | L | F | E | R | F | K | P | W | G | Q |
| □ GLEW□ group | L | V | G | L | W | K | S | W | G | Q |
| | M | V | G | L | W | K | P | R | G | Q |

[0499] In the Nanobodies, each amino acid residue at any other position than the Hallmark Residues can be any amino acid residue that naturally occurs at the corresponding position (according to the Kabat numbering) of a naturally occurring V_{HH} domain.

[0500] Such amino acid residues will be clear to the skilled person. Tables A-5 to A-8 mention some non-limiting residues that can be present at each position (according to the Kabat numbering) of the FR1, FR2, FR3 and FR4 of naturally occurring V_{HH} domains. For each position, the amino acid residue that most frequently occurs at each position of a naturally occurring V_{HH} domain (and which is the most preferred amino acid residue for said position in a Nanobody) is indicated in bold; and other preferred amino acid residues for each position have been underlined (note: the number of amino acid residues that are found at positions 26-30 of naturally occurring V_{HH} domains supports the hypothesis underlying the numbering by Chothia (supra) that the residues at these positions already form part of CDR1.)

[0501] In Tables A-5 □A-8, some of the non-limiting residues that can be present at each position of a human V_{H}3 domain have also been mentioned. Again, for each position, the amino acid residue that most frequently occurs at each position of a naturally occurring human V_{H}3 domain is indicated in bold; and other preferred amino acid residues have been underlined.

[0502] For reference only, Tables A-5-A-8 also contain data on the V_{HH} entropy (□V_{HH}Ent. □) and V_{HH} variability (□V_{HH} Var.□) at each amino acid position for a representative sample of 1118 VHH sequences (data kindly provided by David Lutje Hulsing and Prof. Theo Verrips of Utrecht University). The values for the V_{HH} entropy and the V_{HH} variability provide a measure for the variability and degree of conservation of amino acid residues between the 1118 V_{HH} sequences analyzed: low values (i.e. <1, such as <0.5) indicate that an amino acid residue is highly conserved between the V_{HH} sequences (i.e. little variability). For example, the G at position 8 and the G at position 9 have values for the V_{HH} entropy of 0.1 and 0 respectively, indicating that these residues are highly conserved and have little variability (and in case of position 9 is G in all 1118 sequences analysed), whereas for residues that form part of the CDR□s generally values of 1.5 or more are found (data not shown). Note that (1) the amino acid residues listed in the second column of Tables A-5-A-8 are based on a bigger sample than the 1118 V_{HH} sequences that were analysed for determining the V_{HH} entropy and V_{HH} variability referred to in the last two columns; and (2) the data represented below support the hypothesis that the amino acid residues at positions 27-30 and maybe even also at positions 93 and 94 already form part of the CDR□s (although the invention is not limited to any specific hypothesis or explanation, and as mentioned above, herein the numbering according to Kabat is used). For a general explanation of sequence entropy, sequence variability and the methodology for determining the same, see Oliveira et al., PROTEINS: Structure, Function and Genetics, 52: 544-552 (2003).

TABLE A-5
Non-limiting examples of amino acid residues in FR1
(for the footnotes, see the footnotes to Table A-3)

| | Amino acid residue(s): | | V_{HH} | V_{HH} |
|---|---|---|---|---|
| Pos. | Human V_{H}3 | Camelid V_{HH}'s | Ent. | Var. |
| 1 | E, Q | Q, A, E | — | — |
| 2 | V | V | 0.2 | 1 |
| 3 | Q | Q, K | 0.3 | 2 |
| 4 | L | L | 0.1 | 1 |
| 5 | V, L | Q, E, L, V | 0.8 | 3 |
| 6 | E | E, D, Q, A | 0.8 | 4 |
| 7 | S, T | S, F | 0.3 | 2 |
| 8 | G, R | G | 0.1 | 1 |
| 9 | G | G | 0 | 1 |
| 10 | G, V | G, D, R | 0.3 | 2 |
| 11 | Hallmark residue: L, M, S, V, W; preferably L | | 0.8 | 2 |
| 12 | V, I | V, A | 0.2 | 2 |
| 13 | Q, K, R | Q, E, K, P, R | 0.4 | 4 |
| 14 | P | A, Q, A, G, P, S, T, V | 1 | 5 |
| 15 | G | G | 0 | 1 |
| 16 | G, R | G, A, E, D | 0.4 | 3 |
| 17 | S | S, F | 0.5 | 2 |
| 18 | L | L, V | 0.1 | 1 |
| 19 | R, K | R, K, L, N, S, T | 0.6 | 4 |
| 20 | L | L, F, I, V | 0.5 | 4 |
| 21 | S | S, A, F, T | 0.2 | 3 |
| 22 | C | C | 0 | 1 |
| 23 | A, T | A, D, E, P, S, T, V | 1.3 | 5 |
| 24 | A | A, I, L, S, T, V | 1 | 6 |
| 25 | S | S, A, F, P, T | 0.5 | 5 |
| 26 | G | G, A, D, E, R, S, T, V | 0.7 | 7 |
| 27 | F | S, F, R, L, P, G, N, | 2.3 | 13 |
| 28 | T | N, T, E, D, S, I, R, A, G, R, F, Y | 1.7 | 11 |
| 29 | F, V | F, L, D, S, I, G, V, A | 1.9 | 11 |
| 30 | S, D, G | N, S, E, G, A, D, M, T | 1.8 | 11 |

TABLE A-6
Non-limiting examples of amino acid residues in FR2
(for the footnotes, see the footnotes to Table A-3)

| | Amino acid residue(s): | | V_{HH} | V_{HH} |
|---|---|---|---|---|
| Pos. | Human V_{H}3 | Camelid V_{HH}'s | Ent. | Var. |
| 36 | W | W | 0.1 | 1 |
| 37 | Hallmark residue: F⁽¹⁾, H, I, L, Y | | 1.1 | 6 |
| | or V, preferably F⁽¹⁾ or Y | | | |
| 38 | R | R | 0.2 | 1 |
| 39 | Q | Q, H, P, R | 0.3 | 2 |
| 40 | A | A, F, G, L, P, T, V | 0.9 | 7 |
| 41 | P, S, T | P, A, L, S | 0.4 | 3 |
| 42 | G | G, E | 0.2 | 2 |
| 43 | K | K, D, E, N, Q, R, T, V | 0.7 | 6 |
| 44 | Hallmark residue: G⁽²⁾, E⁽³⁾, A, D, Q, | | 1.3 | 5 |
| | R, S, L; preferably G⁽²⁾, E⁽³⁾ or | | | |
| | Q; most preferably G⁽²⁾ or E⁽³⁾. | | | |
| 45 | Hallmark residue: L⁽²⁾, R⁽³⁾, C, I, L, P, Q, V; | | 0.6 | 4 |
| | preferably L⁽²⁾ or R⁽³⁾ | | | |
| 46 | E, V | E, D, K, Q, V | 0.4 | 2 |
| 47 | Hallmark residue: W⁽²⁾, L⁽¹⁾ or F⁽¹⁾, A, G, I, | | 1.9 | 9 |
| | M, R, S, V or Y; preferably W⁽²⁾, L⁽¹⁾, F⁽¹⁾ or R | | | |
| 48 | V | V, I, L | 0.4 | 3 |
| 49 | S, A, G | A, S, G, T, V | 0.8 | 3 |

TABLE A-7
Non-limiting examples of amino acid residues in FR3
(for the footnotes, see the footnotes to Table A-3)

| | Amino acid residue(s): | | V_{HH} | V_{HH} |
|---|---|---|---|---|
| Pos. | Human V_{H}3 | Camelid V_{HH}'s | Ent. | Var. |
| 66 | R | R | 0.1 | 1 |
| 67 | F | F, L, V | 0.1 | 1 |
| 68 | T | T, A, N, S | 0.5 | 4 |
| 69 | I | I, L, M, V | 0.4 | 4 |
| 70 | S | S, A, F, T | 0.3 | 4 |
| 71 | R | R, G, H, I, L, K, Q, S, T, W | 1.2 | 8 |
| 72 | D, E | D, E, G, N, V | 0.5 | 4 |
| 73 | N, D, G | N, A, D, F, I, K, L, R, S, T, V, Y | 1.2 | 9 |
| 74 | A, S | A, D, G, N, P, S, T, V | 1 | 7 |
| 75 | K | K, A, E, K, L, N, Q, R | 0.9 | 6 |
| 76 | N, S | N, D, K, R, S, T, Y | 0.9 | 6 |
| 77 | S, T, I | T, A, E, I, M, P, S | 0.8 | 5 |
| 78 | L, A | V, L, A, F, G, I, M | 1.2 | 5 |
| 79 | Y, H | Y, A, D, F, H, N, S, T | 1 | 7 |
| 80 | L | L, F, V | 0.1 | 1 |
| 81 | Q | Q, E, I, L, R, T | 0.6 | 5 |
| 82 | M | M, I, L, V | 0.2 | 2 |
| 82a | N, G | N, D, G, H, S, T | 0.8 | 4 |
| 82b | S | S, N, D, G, R, T | 1 | 6 |
| 82c | L | L, P, V | 0.1 | 2 |
| 83 | Hallmark residue: R, K⁽⁵⁾, N, E⁽⁵⁾, G, I, M, Q or T; | | 0.9 | 7 |
| | preferably K or R; most preferably K | | | |
| 84 | Hallmark residue: P⁽⁵⁾, A, D, L, R, S, T, V; | | 0.7 | 6 |
| | preferably P | | | |
| 85 | E, G | E, D, G, Q | 0.5 | 3 |
| 86 | D | D | 0 | 1 |
| 87 | T, M | T, A, S | 0.2 | 3 |
| 88 | A | A, G, S | 0.3 | 2 |
| 89 | V, L | V, A, D, I, L, M, N, R, T | 1.4 | 6 |
| 90 | Y | Y, F | 0 | 1 |
| 91 | Y, H | Y, D, F, H, L, S, T, V | 0.6 | 4 |
| 92 | C | C | 0 | 1 |
| 93 | A, K, T | A, N, G, H, K, N, R, S, T, V, Y | 1.4 | 10 |
| 94 | K, R, T | A, V, C, F, G, I, K, L, R, S or T | 1.6 | 9 |

TABLE A-8
Non-limiting examples of amino acid residues in FR4
(for the footnotes, see the footnotes to Table A-3)

| | Amino acid residue(s): | | V_{HH} | V_{HH} |
|---|---|---|---|---|
| Pos. | Human V_{H}3 | Camelid V_{HH}'s | Ent. | Var. |
| 103 | Hallmark residue: W⁽⁴⁾, P⁽⁶⁾, R⁽⁶⁾, S; preferably W | | 0.4 | 2 |
| 104 | Hallmark residue: G or D; preferably G | | 0.1 | 1 |
| 105 | Q, R | Q, E, K, P, R | 0.6 | 4 |
| 106 | G | G | 0.1 | 1 |
| 107 | T | T, A, I | 0.3 | 2 |
| 108 | Hallmark residue: Q, L⁽⁷⁾ or R: preferably Q or L⁽⁷⁾ | | 0.4 | 3 |
| 109 | V | V | 0.1 | 1 |
| 110 | T | T, I, A | 0.2 | 1 |
| 111 | V | V, A, I | 0.3 | 2 |
| 112 | S | S, F | 0.3 | 1 |
| 113 | S | S, A, L, P, T | 0.4 | 3 |

[0503] Thus, in another preferred, but not limiting aspect, a Nanobody of the invention can be defined as an amino acid sequence with the (general) structure
[0504] FR1-CDR1-FR2-CDR2-FR3-CDR3-FR4
   in which FR1 to FR4 refer to framework regions 1 to 4, respectively, and in which CDR1 to CDR3 refer to the complementarity determining regions 1 to 3, respectively, and in which:
[0505] i) one or more of the amino acid residues at positions 11, 37, 44, 45, 47, 83, 84, 103, 104 and 108 according to the Kabat numbering are chosen from the Hallmark residues mentioned in Table A-3;
   and in which:
[0506] ii) CDR1, CDR2 and CDR3 are as defined herein, and are preferably as defined according to one of the preferred aspects herein, and are more preferably as defined according to one of the more preferred aspects herein.

[0507] The above Nanobodies may for example be V_{HH} sequences or may be humanized Nanobodies. When the above Nanobody sequences are V_{HH} sequences, they may be suitably humanized, as further described herein. When the Nanobodies are partially humanized Nanobodies, they may optionally be further suitably humanized, again as described herein.

[0508] In particular, a Nanobody of the invention can be an amino acid sequence with the (general) structure
[0509] FR1-CDR1-FR2-CDR2-FR3-CDR3-FR4

[0510] in which FR1 to FR4 refer to framework regions 1 to 4, respectively, and in which CDR1 to CDR3 refer to the complementarity determining regions 1 to 3, respectively, and in which:
[0511] i) (preferably) one or more of the amino acid residues at positions 11, 37, 44, 45, 47, 83, 84, 103, 104 and 108 according to the Kabat numbering are chosen from the Hallmark residues mentioned in Table A-3 (it being understood that VHH sequences will contain one or more Hallmark residues; and that partially humanized Nanobodies will usually, and preferably, [still] contain one or more Hallmark residues [although it is also within the scope of the invention to provide—where suitable in accordance with the invention—partially humanized Nanobodies in which all Hallmark residues, but not one or more of the other amino acid residues, have been humanized]; and that in fully humanized Nanobodies, where suitable in accordance with the invention, all amino acid residues at the positions of the Hallmark residues will be amino acid residues that occur in a human V_{H}3 sequence. As will be clear to the skilled person based on the disclosure herein that such V_{HH} sequences, such partially humanized Nanobodies with at least one Hallmark residue, such partially humanized Nanobodies without Hallmark residues and such fully humanized Nanobodies all form aspects of this invention);
   and in which:
[0512] ii) said amino acid sequence has at least 80% amino acid identity with at least one of the amino acid sequences of SEQ ID NO□s: 1 to 22, in which for the purposes of determining the degree of amino acid identity, the amino acid residues that form the CDR sequences (indicated with X in the sequences of SEQ ID NOL s: 1 to 22) are disregarded;
   and in which:
[0513] iii) CDR1, CDR2 and CDR3 are as defined herein, and are preferably as defined according to one of the preferred aspects herein, and are more preferably as defined according to one of the more preferred aspects herein.

[0514] The above Nanobodies may for example be V_{HH} sequences or may be humanized Nanobodies. When the above Nanobody sequences are V_{HH} sequences, they may be suitably humanized, as further described herein. When the Nanobodies are partially humanized Nanobodies, they may optionally be further suitably humanized, again as described herein.

TABLE A-9
Representative amino acid sequences for Nanobodies of the KERE, GLEW and P, R, S 103 group.

| | | |
|---|---|---|
| KERE sequence no. 1 | SEQ ID NO: 1 | EVQLVESGGGLVQPGGSLRLSCAASGIPFSXXXXXWFRQAPGKQRDSVAXXXXXRFTI |
| | | SRDNAKNTVYLQMNSLKPEDTAVYRCYFXXXXXWGQGTQVTVSS |
| KERE sequence no. 2 | SEQ ID NO: 2 | QVKLEESGGGLVQAGGSLRLSCVGSGRTFSXXXXXWFRLAPGKEREFVAXXXXXRFTI |
| | | SRDTASNRGYLHMNNLTPEDTAVYYCAAXXXXXWGQGTQVTVSS |
| KERE sequence no. 3 | SEQ ID NO: 3 | AVQLVDSGGGLVQAGDSLKLSCALTGGAFTXXXXXWFRQTPGREREFVAXXXXXRFTI |
| | | SRDNAKNMVYLRMNSLIPEDAAVYSCAAXXXXXWGQGTLVTVSS |
| KERE sequence no. 4 | SEQ ID NO: 4 | QVQLVESGGGLVEAGGSLRLSCTASESPFRXXXXXWFRQTSGQEREFVAXXXXXRFTI |
| | | SRDDAKNTVWLHGSTLKPEDTAVYYCAAXXXXXWGQGTQVTVSS |
| KERE sequence no. 5 | SEQ ID NO: 5 | AVQLVESGGGLVQGGGSLRLACAASERIFDXXXXXWYRQGPGNERELVAXXXXXRFTI |
| | | SMDYTKQTVYLHMNSLRPEDTGLYYCKIXXXXXWGQGTQVTVSS |
| KERE sequence no. 6 | SEQ ID NO: 6 | DVKFVESGGGLVQAGGSLRLSCVASGFNFDXXXXXWFRQAPGKEREEVAXXXXXRFT |
| | | ISSEKDKNSVYLQMNSLKPEDTALYICAGXXXXXWGRGTQVTVSS |
| KERE sequence no. 7 | SEQ ID NO: 7 | QVRLAESGGGLVQSGGSLRLSCVASGSTYTXXXXXWYRQYPGKQRALVAXXXXXRFT |
| | | IARDSTKDTFCLQMNNLKPEDTAVYYCYAXXXXXWGQGTQVTVSS |
| KERE sequence no. 8 | SEQ ID NO: 8 | EVQLVESGGGLVQAGGSLRLSCAASGFTSDXXXXXWFRQAPGKPREGVSXXXXXRFT |
| | | ISTDNAKNTVHLLMNRVNAEDTALYYCAVXXXXXWGRGTRVTVSS |
| KERE sequence no. 9 | SEQ ID NO: 9 | QVQLVESGGGLVQPGGSLRLSCQASGDISTXXXXXWYRQVPGKLREFVAXXXXXRFTI |
| | | SGDNAKRAIYLQMNNLKPDDTAVYYCNRXXXXXWGQGTQVTVSP |
| KERE sequence no. 10 | SEQ ID NO: 10 | QVPVVESGGGLVQAGDSLRLFCAVPSFTSTXXXXXWFRQAPGKEREFVAXXXXXRFTI |
| | | SRNATKNTLTLRMDSLKPEDTAVYYCAAXXXXXWGQGTQVTVSS |
| KERE sequence no. 11 | SEQ ID NO: 11 | EVQLVESGGGLVQAGDSLRLFCTVSGGTASXXXXXWFRQAPGEKREFVAXXXXXRFTI |
| | | ARENAGNMVYLQMNNLKPDDTALYTCAAXXXXXWGRGTQVTVSS |
| KERE sequence no. 12 | SEQ ID NO: 12 | AVQLVESGGDSVQPGDSQTLSCAASGRTNSXXXXXWFRQAPGKERVFLAXXXXXRFT |
| | | ISRDSAKNMMYLQMNNLKPQDTAVYYCAAXXXXXWGQGTQVTVSS |
| KERE sequence no. 13 | SEQ ID NO: 13 | AVQLVESGGGLVQAGGSLRLSCVVSGLTSSXXXXXWFRQTPWQERDFVAXXXXXRFT |
| | | ISRDNYKDTVLLEMNFLKPEDTAIYYCAAXXXXXWGQGTQVTVSS |
| KERE sequence no. 14 | SEQ ID NO: 14 | AVQLVESGGGLVQAGASLRLSCATSTRTLDXXXXXWFRQAPGRDREFVAXXXXXRFT |
| | | VSRDSAENTVALQMNSLKPEDTAVYYCAAXXXXXWGQGTRVTVSS |
| KERE sequence no. 15 | SEQ ID NO: 15 | QVQLVESGGGLVQPGGSLRLSCTVSRLTAHXXXXXWFRQAPGKEREAVSXXXXXRFTI |
| | | SRDYAGNTAFLQMDSLKPEDTGVYYCATXXXXXWGQGTQVTVSS |
| KERE sequence no. 16 | SEQ ID NO: 16 | EVQLVESGGELVQAGGSLKLSCTASGRNFVXXXXXWFRRAPGKEREFVAXXXXXRFT |
| | | VSRDNGKNTAYLRMNSLKPEDTADYYCAVXXXXXLGSGTQVTVSS |
| GLEW sequence no. 1 | SEQ ID NO: 17 | AVQLVESGGGLVQPGGSLRLSCAASGFTFSXXXXXWVRQAPGKVLEWVSXXXXXRFT |
| | | ISRDNAKNTLYLQMNSLKPEDTAVYYCVKXXXXXGSQGTQVTVSS |
| GLEW sequence no. 2 | SEQ ID NO: 18 | EVQLVESGGGLVQPGGSLRLSCVCVSSGCTXXXXXWVRQAPGKAEEWVSXXXXXRF |
| | | KISRDNAKKTLYLQMNSLGPEDTAMYYCQRXXXXXRGQGTQVTVSS |
| GLEW sequence no. 3 | SEQ ID NO: 19 | EVQLVESGGGLALPGGSLTLSCVFSGSTFSXXXXXWVRHTPGKAEEWVSXXXXXRFTI |
| | | SRDNAKNTLYLEMNSLSPEDTAMYYCGRXXXXXRSKGIQVTVSS |
| P, R, S 103 | SEQ ID NO: 20 | AVQLVESGGGLVQAGGSLRLSCAASGRTFSXXXXXWFRQAPGKEREFVAXXXXXRFTI |
| sequence no. 1 | | SRDNAKNTVYLQMNSLKPEDTAVYYCAAXXXXXRGQGTQVTVSS |
| P, R, S 103 | SEQ ID NO: 21 | DVQLVESGGDLVQPGGSLRLSCAASGFSFDXXXXXWLRQTPGKGLEWVGXXXXXRFT |
| sequence no. 2 | | ISRDNAKNMLYLHLNNLKSEDTAVYYCRRXXXXXLGQGTQVTVSS |
| P, R, S 103 | SEQ ID NO: 22 | EVQLVESGGGLVQPGGSLRLSCVCVSSGCTXXXXXWVRQAPGKAEEWVSXXXXXRF |
| sequence no. 3 | | KISRDNAKKTLYLQMNSLGPEDTAMYYCQRXXXXXRGQGTQVTVSS |

The CDR□ s are indicated with XXXX

[0515] In particular, a Nanobody of the invention of the KERE group can be an amino acid sequence with the (general) structure
[0516] FR1-CDR1-FR2-CDR2-FR3-CDR3-FR4
   in which:
[0517] i) the amino acid residue at position 45 according to the Kabat numbering is a charged amino acid (as defined herein) or a cysteine residue, and position 44 is preferably an E;
   and in which:
[0518] ii) FR1 is an amino acid sequence that has at least 80% amino acid identity with at least one of the following amino acid sequences:

TABLE A-10
Representative FW1 sequences for Nanobodies of the KERE-group.

| | | |
|---|---|---|
| KERE FW1 sequence no. 1 | SEQ ID NO: 23 | QVQRVESGGGLVQAGGSLRLSCAASGRTSS |
| KERE FW1 sequence no. 2 | SEQ ID NO: 24 | QVQLVESGGGLVQTGDSLSLSCSASGRTFS |
| KERE FW1 sequence no. 3 | SEQ ID NO: 25 | QVKLEESGGGLVQAGDSLRLSCAATGRAFG |
| KERE FW1 sequence no. 4 | SEQ ID NO: 26 | AVQLVESGGGLVQPGESLGLSCVASGRDFV |
| KERE FW1 sequence no. 5 | SEQ ID NO: 27 | EVQLVESGGGLVQAGGSLRLSCEVLGRTAG |
| KERE FW1 sequence no. 6 | SEQ ID NO: 28 | QVQLVESGGGWVQPGGSLRLSCAASETILS |
| KERE FW1 sequence no. 7 | SEQ ID NO: 29 | QVQLVESGGGTVQPGGSLNLSCVASGNTFN |
| KERE FW1 sequence no. 8 | SEQ ID NO: 30 | EVQLVESGGGLAQPGGSLQLSCSAPGFTLD |
| KERE FW1 sequence no. 9 | SEQ ID NO: 31 | AQELEESGGGLVQAGGSLRLSCAASGRTFN |

and in which:
[0519] iii) FR2 is an amino acid sequence that has at least 80% amino acid identity with at least one of the following amino acid sequences:

TABLE A-11
Representative FW2 sequences for Nanobodies of the KERE-group.

| | | |
|---|---|---|
| KERE FW2 sequence no. 1 | SEQ ID NO: 41 | WFRQAPGKEREFVA |
| KERE FW2 sequence no. 2 | SEQ ID NO: 42 | WFRQTPGREREFVA |
| KERE FW2 sequence no. 3 | SEQ ID NO: 43 | WYRQAPGKQREMVA |
| KERE FW2 sequence no. 4 | SEQ ID NO: 44 | WYRQGPGKQRELVA |
| KERE FW2 sequence no. 5 | SEQ ID NO: 45 | WIRQAPGKEREGVS |
| KERE FW2 sequence no. 6 | SEQ ID NO: 46 | WFREAPGKEREGIS |
| KERE FW2 sequence no. 7 | SEQ ID NO: 47 | WYRQAPGKERDLVA |
| KERE FW2 sequence no. 8 | SEQ ID NO: 48 | WFRQAPGKQREEVS |
| KERE FW2 sequence no. 9 | SEQ ID NO: 49 | WFRQPPGKVREFVG |

and in which:
[0520] iv) FR3 is an amino acid sequence that has at least 80% amino acid identity with at least one of the following amino acid sequences:

TABLE A-12
Representative FW3 sequences for Nanobodies of the KERE-group.

| | | |
|---|---|---|
| KERE FW3 sequence no. 1 | SEQ ID NO: 50 | RFTISRDNAKNTVYLQMNSLKPEDTAVYRCYF |
| KERE FW3 sequence no. 2 | SEQ ID NO: 51 | RFAISRDNNKNTGYLQMNSLEPEDTAVYYCAA |
| KERE FW3 sequence no. 3 | SEQ ID NO: 52 | RFTVARNNAKNTVNLEMNSLKPEDTAVYYCAA |
| KERE FW3 sequence no. 4 | SEQ ID NO: 53 | RFTISRDIAKNTVDLLMNNLEPEDTAVYYCAA |
| KERE FW3 sequence no. 5 | SEQ ID NO: 54 | RLTISRDNAVDTMYLQMNSLKPEDTAVYYCAA |
| KERE FW3 sequence no. 6 | SEQ ID NO: 55 | RFTISRDNAKNTVYLQMDNVKPEDTAIYYCAA |
| KERE FW3 sequence no. 7 | SEQ ID NO: 56 | RFTISKDSGKNTVYLQMTSLKPEDTAVYYCAT |
| KERE FW3 sequence no. 8 | SEQ ID NO: 57 | RFTISRDSAKNMMYLQMNNLKPQDTAVYYCAA |
| KERE FW3 sequence no. 9 | SEQ ID NO: 58 | RFTISRENDKSTVYLQLNSLKPEDTAVYYCAA |
| KERE FW3 sequence no. 10 | SEQ ID NO: 59 | RFTISRDYAGNTAYLQMNSLKPEDTGVYYCAT |

and in which:
[0521] v) FR4 is an amino acid sequence that has at least 80% amino acid identity with at least one of the following amino acid sequences:

TABLE A-13
Representative FW4 sequences for Nanobodies of the KERE-group.

| | | |
|---|---|---|
| KERE FW4 sequence no. 1 | SEQ ID NO: 60 | WGQGTQVTVSS |
| KERE FW4 sequence no. 2 | SEQ ID NO: 61 | WGKGTLVTVSS |
| KERE FW4 sequence no. 3 | SEQ ID NO: 62 | RGQGTRVTVSS |
| KERE FW4 sequence no. 4 | SEQ ID NO: 63 | WGLGTQVTISS |

and in which:
[0522] vi) CDR1, CDR2 and CDR3 are as defined herein, and are preferably as defined according to one of the preferred aspects herein, and are more preferably as defined according to one of the more preferred aspects herein.

[0523] In the above Nanobodies, one or more of the further Hallmark residues are preferably as described herein (for example, when they are V_{HH} sequences or partially humanized Nanobodies).

[0524] Also, the above Nanobodies may for example be V_{HH} sequences or may be humanized Nanobodies. When the above Nanobody sequences are V_{HH} sequences, they may be suitably humanized, as further described herein. When the Nanobodies are partially humanized Nanobodies, they may optionally be further suitably humanized, again as described herein.

[0525] With regard to framework 1, it will be clear to the skilled person that, when an amino acid sequence as outlined above is generated by expression of a nucleotide sequence, the first four amino acid sequences (i.e. amino acid residues 1-4 according to the Kabat numbering) may often be determined by the primer(s) that have been used to generate said nucleic acid. Thus, for determining the degree of amino acid identity, the first four amino acid residues are preferably disregarded.

[0526] Also, with regard to framework 1, and although amino acid positions 27 to 30 are according to the Kabat numbering considered to be part of the framework regions (and not the CDR□s), it has been found by analysis of a database of more than 1000 V_{HH} sequences that the positions 27 to 30 have a variability (expressed in terms of VHH entropy and V_{HH} variability □see Tables A-5 to A-8) that is much greater than the variability on positions 1 to 26. Because of this, for determining the degree of amino acid identity, the amino acid residues at positions 27 to 30 are preferably also disregarded.

[0527] In view of this, a Nanobody of the KERE class may be an amino acid sequence that is comprised of four framework regions/sequences interrupted by three complementarity determining regions/sequences, in which:
[0528] i) the amino acid residue at position 45 according to the Kabat numbering is a charged amino acid (as defined herein) or a cysteine residue, and position 44 is preferably an E;
   and in which:
[0529] ii) FR1 is an amino acid sequence that, on positions 5 to 26 of the Kabat numbering, has at least 80% amino acid identity with at least one of the following amino acid sequences:

TABLE A-14
Representative FW1 sequences (amino acid residues 5 to 26) for
Nanobodies of the KERE-group.

| | | |
|---|---|---|
| KERE FW1 sequence no. 10 | SEQ ID NO: 32 | VESGGGLVQPGGSLRLSCAASG |
| KERE FW1 sequence no. 11 | SEQ ID NO: 33 | VDSGGGLVQAGDSLKLSCALTG |
| KERE FW1 sequence no. 12 | SEQ ID NO: 34 | VDSGGGLVQAGDSLRLSCAASG |
| KERE FW1 sequence no. 13 | SEQ ID NO: 35 | VDSGGGLVEAGGSLRLSCQVSE |
| KERE FW1 sequence no. 14 | SEQ ID NO: 36 | QDSGGGSVQAGGSLKLSCAASG |
| KERE FW1 sequence no. 15 | SEQ ID NO: 37 | VQSGGRLVQAGDSLRLSCAASE |
| KERE FW1 sequence no. 16 | SEQ ID NO: 38 | VESGGTLVQSGDSLKLSCASST |
| KERE FW1 sequence no. 17 | SEQ ID NQ: 39 | MESGGDSVQSGGSLTLSCVASG |
| KERE FW1 sequence no. 18 | SEQ ID NO: 40 | QASGGGLVQAGGSLRLSCSASV |

and in which:
[0530] iii) FR2, FR3 and FR4 are as mentioned herein for FR2, FR3 and FR4 of Nanobodies of the KERE-class;
   and in which:
[0531] iv) CDR1, CDR2 and CDR3 are as defined herein, and are preferably as defined according to one of the preferred aspects herein, and are more preferably as defined according to one of the more preferred aspects herein.

[0532] The above Nanobodies may for example be V_{HH} sequences or may be humanized Nanobodies. When the above Nanobody sequences are V_{HH} sequences, they may be suitably humanized, as further described herein. When the Nanobodies are partially humanized Nanobodies, they may optionally be further suitably humanized, again as described herein.

[0533] A Nanobody of the GLEW class may be an amino acid sequence that is comprised of four framework regions/sequences interrupted by three complementarity determining regions/sequences, in which
[0534] i) preferably, when the Nanobody of the GLEW-class is a non-humanized Nanobody, the amino acid residue in position 108 is Q;
[0535] ii) FR1 is an amino acid sequence that has at least 80% amino acid identity with at least one of the following amino acid sequences:

TABLE A-15
Representative FW1 sequences for Nanobodies of the GLEW-group.

| | | |
|---|---|---|
| GLEW FW1 sequence no. 1 | SEQ ID NO: 64 | QVQLVESGGGLVQPGGSLRLSCAASGFTFS |
| GLEW FW1 sequence no. 2 | SEQ ID NO: 65 | EVHLVESGGGLVRPGGSLRLSCAAFGFIFK |
| GLEW FW1 sequence no. 3 | SEQ ID NO: 66 | QVKLEESGGGLAQPGGSLRLSCVASGFTFS |
| GLEW FW1 sequence no. 4 | SEQ ID NO: 67 | EVQLVESGGGLVQPGGSLRLSCVCVSSGCT |
| GLEW FW1 sequence no. 5 | SEQ ID NO: 68 | EVQLVESGGGLALPGGSLTLSCVFSGSTFS |

and in which:
[0536] iii) FR2 is an amino acid sequence that has at least 80% amino acid identity with at least one of the following amino acid sequences:

TABLE A-16
Representative FW2 sequences for Nanobodies of the GLEW-group.

| | | |
|---|---|---|
| GLEW FW2 sequence no. 1 | SEQ ID NO: 72 | WVRQAPGKVLEWVS |
| GLEW FW2 sequence no. 2 | SEQ ID NO: 73 | WVRRPPGKGLEWVS |
| GLEW FW2 sequence no. 3 | SEQ ID NO: 74 | WVRQAPGMGLEWVS |
| GLEW FW2 sequence no. 4 | SEQ ID NO: 75 | WVRQAPGKEPEWVS |
| GLEW FW2 sequence no. 5 | SEQ ID NO: 76 | WVRQAPGKDQEWVS |
| GLEW FW2 sequence no. 6 | SEQ ID NO: 77 | WVRQAPGKAEEWVS |
| GLEW FW2 sequence no. 7 | SEQ ID NO: 78 | WVRQAPGKGLEWVA |
| GLEW FW2 sequence no. 8 | SEQ ID NO: 79 | WVRQAPGRATEWVS |

and in which:
[0537] iv) FR3 is an amino acid sequence that has at least 80% amino acid identity with at least one of the following amino acid sequences:

TABLE A-17
Representative FW3 sequences for Nanobodies of the GLEW-group.

| | | |
|---|---|---|
| GLEW FW3 sequence no. 1 | SEQ ID NO: 80 | RFTISRDNAKNTLYLQMNSLKPEDTAVYYCVK |
| GLEW FW3 sequence no. 2 | SEQ ID NO: 81 | RFTISRDNARNTLYLQMDSLIPEDTALYYCAR |
| GLEW FW3 sequence no. 3 | SEQ ID NO: 82 | RFTSSRDNAKSTLYLQMNDLKPEDTALYYCAR |
| GLEW FW3 sequence no. 4 | SEQ ID NO: 83 | RFIISRDNAKNTLYLQMNSLGPEDTAMYYCQR |
| GLEW FW3 sequence no. 5 | SEQ ID NO: 84 | RFTASRDNAKNTLYLQMNSLKSEDTARYYCAR |
| GLEW FW3 sequence no. 6 | SEQ ID NO: 85 | RFTISRDNAKNTLYLQMDDLQSEDTAMYYCGR |

and in which:
[0538] v) FR4 is an amino acid sequence that has at least 80% amino acid identity with at least one of the following amino acid sequences:

TABLE A-18
Representative FW4 sequences for
Nanobodies of the GLEW-group.

| | | |
|---|---|---|
| GLEW FW4 sequence no. 1 | SEQ ID NO: 86 | GSQGTQVTVSS |
| GLEW FW4 sequence no. 2 | SEQ ID NO: 87 | LRGGTQVTVSS |
| GLEW FW4 sequence no. 3 | SEQ ID NO: 88 | RGQGTLVTVSS |
| GLEW FW4 sequence no. 4 | SEQ ID NO: 89 | RSRGIQVTVSS |
| GLEW FW4 sequence no. 5 | SEQ ID NO: 90 | WGKGTQVTVSS |
| GLEW FW4 sequence no. 6 | SEQ ID NO: 91 | WGQGTQVTVSS |

and in which:
[0539] vi) CDR1, CDR2 and CDR3 are as defined herein, and are preferably as defined according to one of the preferred aspects herein, and are more preferably as defined according to one of the more preferred aspects herein.

[0540] In the above Nanobodies, one or more of the further Hallmark residues are preferably as described herein (for example, when they are Vim sequences or partially humanized Nanobodies).

[0541] With regard to framework 1, it will again be clear to the skilled person that, for determining the degree of amino acid identity, the amino acid residues on positions 1 to 4 and 27 to 30 are preferably disregarded.

[0542] In view of this, a Nanobody of the GLEW class may be an amino acid sequence that is comprised of four framework regions/sequences interrupted by three complementarity determining regions/sequences, in which:
[0543] i) preferably, when the Nanobody of the GLEW-class is a non-humanized Nanobody, the amino acid residue in position 108 is Q;
   and in which:
[0544] ii) FR1 is an amino acid sequence that, on positions 5 to 26 of the Kabat numbering, has at least 80% amino acid identity with at least one of the following amino acid sequences:

TABLE A-19
Representative FW1 sequences (amino acid residues 5 to 26) for Nanobodies
of the KERE-group.

| | | |
|---|---|---|
| GLEW FW1 sequence no. 6 | SEQ ID NO: 69 | VESGGGLVQPGGSLRLSCAASG |
| GLEW FW1 sequence no. 7 | SEQ ID NO: 70 | EESGGGLAQPGGSLRLSCVASG |
| GLEW FW1 sequence no. 8 | SEQ ID NO: 71 | VESGGGLALPGGSLTLSCVFSG |

and in which:
[0545] iii) FR2, FR3 and FR4 are as mentioned herein for FR2, FR3 and FR4 of Nanobodies of the GLEW-class;
   and in which:
[0546] iv) CDR1, CDR2 and CDR3 are as defined herein, and are preferably as defined according to one of the preferred aspects herein, and are more preferably as defined according to one of the more preferred aspects herein.

[0547] The above Nanobodies may for example be V_{HH} sequences or may be humanized Nanobodies. When the above Nanobody sequences are V_{HH} sequences, they may be suitably humanized, as further described herein. When the Nanobodies are partially humanized Nanobodies, they may optionally be further suitably humanized, again as described herein. In the above Nanobodies, one or more of the further Hallmark residues are preferably as described herein (for example, when they are V_{HH} sequences or partially humanized Nanobodies).

[0548] A Nanobody of the P, R, S 103 class may be an amino acid sequence that is comprised of four framework regions/sequences interrupted by three complementarity determining regions/sequences, in which
[0549] i) the amino acid residue at position 103 according to the Kabat numbering is different from W;
   and in which:
[0550] ii) preferably the amino acid residue at position 103 according to the Kabat numbering is P, R or S, and more preferably R;
   and in which:
[0551] iii) FR1 is an amino acid sequence that has at least 80% amino acid identity with at least one of the following amino acid sequences:

TABLE A-20
Representative FW1 sequences for Nanobodies of the P, R, S 103-group.

| | | |
|---|---|---|
| P, R, S 103 FW1 sequence no. 1 | SEQ ID NO: 92 | AVQLVESGGGLVQAGGSLRLSCAASGRTFS |
| P, R, S 103 FW1 sequence no. 2 | SEQ ID NO: 93 | QVQLQESGGGMVQPGGSLRLSCAASGFDFG |
| P, R, S 103 FW1 sequence no. 3 | SEQ ID NO: 94 | EVHLVESGGGLVRPGGSLRLSCAAFGFIFK |
| P, R, S 103 FW1 sequence no. 4 | SEQ ID NO: 95 | QVQLAESGGGLVQPGGSLKLSCAASRTIVS |
| P, R, S 103 FW1 sequence no. 5 | SEQ ID NO: 96 | QEHLVESGGGLVDIGGSLRLSCAASERIFS |
| P, R, S 103 FW1 sequence no. 6 | SEQ ID NO: 97 | QVKLEESGGGLAQPGGSLRLSCVASGFTFS |
| P, R, S 103 FW1 sequence no. 7 | SEQ ID NO: 98 | EVQLVESGGGLVQPGGSLRLSCVCVSSGCT |
| P, R, S 103 FW1 sequence no. 8 | SEQ ID NO: 99 | EVQLVESGGGLALPGGSLTLSCVFSGSTFS |

and in which
[0552] iv) FR2 is an amino acid sequence that has at least 80% amino acid identity with at least one of the following amino acid sequences:

TABLE A-21
Representative FW2 sequences for Nanobodies of the P, R, S 103-group.

| | | |
|---|---|---|
| P, R, S 103 FW2 sequence no. 1 | SEQ ID NO: 102 | WFRQAPGKEREFVA |
| P, R, S 103 FW2 sequence no. 2 | SEQ ID NO: 103 | WVRQAPGKVLEWVS |
| P, R, S 103 FW2 sequence no. 3 | SEQ ID NO: 104 | WVRRPPGKGLEWVS |
| P, R, S 103 FW2 sequence no. 4 | SEQ ID NO: 105 | WIRQAPGKEREGVS |
| P, R, S 103 FW2 sequence no. 5 | SEQ ID NO: 106 | WVRQYPGKEPEWVS |
| P, R, S 103 FW2 sequence no. 6 | SEQ ID NO: 107 | WFRQPPGKEHEFVA |
| P, R, S 103 FW2 sequence no. 7 | SEQ ID NO: 108 | WYRQAPGKRTELVA |
| P, R, S 103 FW2 sequence no. 8 | SEQ ID NO: 109 | WLRQAPGQGLEWVS |
| P, R, S 103 FW2 sequence no. 9 | SEQ ID NO: 110 | WLRQTPGKGLEWVG |
| P, R, S 103 FW2 sequence no. 10 | SEQ ID NO: 111 | WVRQAPGKAEEFVS |

and in which:
[0553] v) FR3 is an amino acid sequence that has at least 80% amino acid identity with at least one of the following amino acid sequences:

TABLE A-22
Representative FW3 sequences for Nanobodies of the P, R, S 103-group.

| | | |
|---|---|---|
| P, R, S 103 FW3 sequence no. 1 | SEQ ID NO: 112 | RFTISRDNAKNTVYLQMNSLKPEDTAVYYCAA |
| P, R, S 103 FW3 sequence no. 2 | SEQ ID NO: 113 | RFTISRDNARNTLYLQMDSLIPEDTALYYCAR |
| P, R, S 103 FW3 sequence no. 3 | SEQ ID NO: 114 | RFTISRDNAKNEMYLQMNNLKTEDTGVYWCGA |
| P, R, S 103 FW3 sequence no. 4 | SEQ ID NO: 115 | RFTISSDSNRNMIYLQMNNLKPEDTAVYYCAA |
| P, R, S 103 FW3 sequence no. 5 | SEQ ID NO: 116 | RFTISRDNAKNMLYLHLNNLKSEDTAVYYCRR |
| P, R, S 103 FW3 sequence no. 6 | SEQ ID NO: 117 | RFTISRDNAKKTVYLRLNSLNPEDTAVYSCNL |
| P, R, S 103 FW3 sequence no. 7 | SEQ ID NO: 118 | RFKISRDNAKKTLYLQMNSLGPEDTAMYYCQR |
| P, R, S 103 FW3 sequence no. 8 | SEQ ID NO: 119 | RFTVSRDNGKNTAYLRMNSLKPEDTADYYCAV |

and in which:
[0554] vi) FR4 is an amino acid sequence that has at least 80% amino acid identity with at least one of the following amino acid sequences:

TABLE A-23
Representative FW4 sequences for Nanobodies of the
P, R, S 103-group.

| | | |
|---|---|---|
| P, R, S 103 FW4 sequence no. 1 | SEQ ID NO: 120 | RGQGTQVTVSS |
| P, R, S 103 FW4 sequence no. 2 | SEQ ID NO: 121 | LRGGTQVTVSS |
| P, R, S 103 FW4 sequence no. 3 | SEQ ID NO: 122 | GNKGTLVTVSS |
| P, R, S 103 FW4 sequence no. 4 | SEQ ID NO: 123 | SSPGTQVTVSS |
| P, R, S 103 FW4 sequence no. 5 | SEQ ID NO: 124 | SSQGTLVTVSS |
| P, R, S 103 FW4 sequence no. 6 | SEQ ID NO: 125 | RSRGIQVTVSS |

and in which:
[0555] vii) CDR1, CDR2 and CDR3 are as defined herein, and are preferably as defined according to one of the preferred aspects herein, and are more preferably as defined according to one of the more preferred aspects herein.

[0556] In the above Nanobodies, one or more of the further Hallmark residues are preferably as described herein (for example, when they are V_{HH} sequences or partially humanized Nanobodies).

[0557] With regard to framework 1, it will again be clear to the skilled person that, for determining the degree of amino acid identity, the amino acid residues on positions 1 to 4 and 27 to 30 are preferably disregarded.

[0558] In view of this, a Nanobody of the P,R,S 103 class may be an amino acid sequence that is comprised of four framework regions/sequences interrupted by three complementarity determining regions/sequences, in which:
[0559] i) the amino acid residue at position 103 according to the Kabat numbering is different from W;
   and in which:
[0560] ii) preferably the amino acid residue at position 103 according to the Kabat numbering is P, R or S, and more preferably R;
   and in which:
[0561] iii) FR1 is an amino acid sequence that, on positions 5 to 26 of the Kabat numbering, has at least 80% amino acid identity with at least one of the following amino acid sequences:

TABLE A-24
Representative FW1 sequences (amino acid residues 5 to 26) for
Nanobodies of the P, R, S 103-group.

| | | |
|---|---|---|
| P, R, S 103 FW1 sequence no. 9 | SEQ ID NO: 100 | VESGGGLVQAGGSLRLSCAASG |
| P, R, S 103 FW1 sequence no. 10 | SEQ ID NO: 101 | AESGGGLVQPGGSLKLSCAASR |

and in which:
[0562] iv) FR2, FR3 and FR4 are as mentioned herein for FR2, FR3 and FR4 of Nanobodies of the P,R,S 103 class;
   and in which:
[0563] v) CDR1, CDR2 and CDR3 are as defined herein, and are preferably as defined according to one of the preferred aspects herein, and are more preferably as defined according to one of the more preferred aspects herein.

[0564] The above Nanobodies may for example be V_{HH} sequences or may be humanized Nanobodies. When the above Nanobody sequences are V_{HH} sequences, they may be suitably humanized, as further described herein. When the Nanobodies are partially humanized Nanobodies, they may optionally be further suitably humanized, again as described herein.

[0565] In the above Nanobodies, one or more of the further Hallmark residues are preferably as described herein (for example, when they are V_{HH} sequences or partially humanized Nanobodies).

[0566] In another preferred, but non-limiting aspect, the invention relates to a Nanobody as described above, in which the CDR sequences have at least 70% amino acid identity, preferably at least 80% amino acid identity, more preferably at least 90% amino acid identity, such as 95% amino acid identity or more or even essentially 100% amino acid identity with the CDR sequences of at least one of the amino acid sequences of SEQ ID NO□s 1316 to 1476, and SEQ ID NO: 1485, 1486, and 1487 (see Table 1). This degree of amino acid identity can for example be determined by determining the degree of amino acid identity (in a manner described herein) between said Nanobody and one or more of the sequences of SEQ ID NO□s 1316 to 1476, and SEQ ID NO: 1485, 1486, and 1487 (see Table 1), in which the amino acid residues that form the framework regions are disregarded. Such Nanobodies can be as further described herein.

[0567] As already mentioned herein, another preferred but non-limiting aspect of the invention relates to a Nanobody with an amino acid sequence that is chosen from the group consisting of SEQ ID NO□s 1316 to 1476, and SEQ ID NO: 1485, 1486, and 1487 (see Table 1) or from the group consisting of from amino acid sequences that have more than 80%, preferably more than 90%, more preferably more than 95%, such as 99% or more sequence identity (as defined herein) with at least one of the amino acid sequences of SEQ ID NO□s: 1316 to 1476, and SEQ ID NO: 1485, 1486, and 1487 (see Table 1).

[0568] Also, in the above Nanobodies:
[0569] i) any amino acid substitution (when it is not a humanizing substitution as defined herein) is preferably, and compared to the corresponding amino acid sequence of SEQ ID NO□s 1316 to 1476, and SEQ ID NO: 1485, 1486, and 1487 (see Table 1), a conservative amino acid substitution, (as defined herein);
   and/or:
[0570] ii) its amino acid sequence preferably contains either only amino acid substitutions, or otherwise preferably no more than 5, preferably no more than 3, and more preferably only 1 or 2 amino acid deletions or insertions, compared to the corresponding amino acid sequence of SEQ ID NOD□s 1316 to 1476, and SEQ ID NO: 1485, 1486, and 1487 (see Table 1);
   and/or
[0571] iii) the CDR□s may be CDR□s that are derived by means of affinity maturation, for example starting from the CDR□s of to the corresponding amino acid sequence of SEQ ID NO□s: 1316 to 1476, and SEQ ID NO: 1485, 1486, and 1487 (see Table 1).

[0572] Preferably, the CDR sequences and FR sequences in the Nanobodies of the invention are such that the Nanobodies of the invention (and polypeptides of the invention comprising the same):
[0573] bind to Integrins with a dissociation constant (K_{D}) of 10⁻⁵ to 10⁻¹² moles/liter or less, and preferably 10⁻⁷ to 10⁻¹² moles/liter or less and more preferably 10⁻⁸ to 10⁻¹² moles/liter (i.e. with an association constant (K_{A}) of 10⁵ to 10¹² liter/moles or more, and preferably 10⁷ to 10¹² liter/moles or more and more preferably 10⁸ to 10¹² liter/moles);
   and/or such that they:
[0574] bind to Integrins with a kₒₙ-rate of between 10² M⁻¹s⁻¹ to about 10⁷ M⁻¹ s⁻¹, preferably between 10³ M⁻¹s⁻¹ and 10⁷ s⁻¹, more preferably between 10⁴ M⁻¹s⁻¹ and 10⁷ M⁻¹s⁻¹, such as between 10⁵ M⁻¹s⁻¹ and 10⁷ M⁻¹s⁻¹;
   and/or such that they:
[0575] bind to Integrins with a k_{off}-rate between 1s⁻¹ (t_{1/2}=0.69 s) and 10⁻⁶ (providing a near irreversible complex with a t_{1/2} of multiple days), preferably between 10⁻² s⁻¹ and 10⁻⁶ s⁻¹, more preferably between 10⁻³ s⁻¹ and 10⁻⁶ s⁻¹, such as between 10⁻⁴ s⁻¹ and 10⁻⁶ s⁻¹.

[0576] Preferably, CDR sequences and FR sequences present in the Nanobodies of the invention are such that the Nanobodies of the invention will bind to Integrins with an affinity less than 500 nM, preferably less than 200 nM, more preferably less than 10 nM, such as less than 500 pM.

[0577] According to one non-limiting aspect of the invention, a Nanobody may be as defined herein, but with the proviso that it has at least □one amino acid difference□ (as defined herein) in at least one of the framework regions compared to the corresponding framework region of a naturally occurring human V_{H} domain, and in particular compared to the corresponding framework region of DP-47. More specifically, according to one non-limiting aspect of the invention, a Nanobody may be as defined herein, but with the proviso that it has at least □one amino acid difference□ (as defined herein) at least [symbol] Hallmark residues (including those at positions 108, 103 and/or 45) compared to the corresponding framework region of a naturally occurring human V_{H} domain, and in particular compared to the corresponding framework region of DP-47. Usually, a Nanobody will have at least one such amino acid difference with a naturally occurring V_{H} domain in at least one of FR2 and/or FR4, and in particular at least one of the Hallmark residues in FR2 and/or FR4 (again, including those at positions 108, 103 and/or 45).

[0578] Also, a humanized Nanobody of the invention may be as defined herein, but with the proviso that it has at least □one amino acid difference□ (as defined herein) in at least one of the framework regions compared to the corresponding framework region of a naturally occurring V_{HH} domain. More specifically, according to one non-limiting aspect of the invention, a humanized Nanobody may be as defined herein, but with the proviso that it has at least □one amino acid difference □ (as defined herein) at [symbol] mark residues (including those at positions 108, 103 and/or 45) compared to the corresponding framework region of a naturally occurring V_{HH} domain. Usually, a humanized Nanobody will have at least one such amino acid difference with a naturally occurring V_{HH} domain in at least one of FR2 and/or FR4, and in particular at least one of the Hallmark residues in FR2 and/or FR4 (again, including those at positions 108, 103 and/or 45).

[0579] As will be clear from the disclosure herein, it is also within the scope of the invention to use natural or synthetic analogs, mutants, variants, alleles, homologs and orthologs (herein collectively referred to as □analogs□) of the Nanobodies of the invention as defined herein, and in particular analogs of the Nanobodies of SEQ ID NO□s 1316 to 1476, and SEQ ID NO: 1485, 1486, and 1487 (see Table 1). Thus, according to one aspect of the invention, the term □Nanobody of the invention□ in its broadest sense also covers such analogs.

[0580] Generally, in such analogs, one or more amino acid residues may have been replaced, deleted and/or added, compared to the Nanobodies of the invention as defined herein. Such substitutions, insertions or deletions may be made in one or more of the framework regions and/or in one or more of the CDR□s. When such substitutions, insertions or deletions are made in one or more of the framework regions, they may be made at one or more of the Hallmark residues and/or at one or more of the other positions in the framework residues, although substitutions, insertions or deletions at the Hallmark residues are generally less preferred (unless these are suitable humanizing substitutions as described herein).

[0581] By means of non-limiting examples, a substitution may for example be a conservative substitution (as described herein) and/or an amino acid residue may be replaced by another amino acid residue that naturally occurs at the same position in another V_{HH} domain (see Tables A-5 to A-8 for some non-limiting examples of such substitutions), although the invention is generally not limited thereto. Thus, any one or more substitutions, deletions or insertions, or any combination thereof, that either improve the properties of the Nanobody of the invention or that at least do not detract too much from the desired properties or from the balance or combination of desired properties of the Nanobody of the invention (i.e. to the extent that the Nanobody is no longer suited for its intended use) are included within the scope of the invention. A skilled person will generally be able to determine and select suitable substitutions, deletions or insertions, or suitable combinations of thereof, based on the disclosure herein and optionally after a limited degree of routine experimentation, which may for example involve introducing a limited number of possible substitutions and determining their influence on the properties of the Nanobodies thus obtained.

[0582] For example, and depending on the host organism used to express the Nanobody or polypeptide of the invention, such deletions and/or substitutions may be designed in such a way that one or more sites for post-translational modification (such as one or more glycosylation sites) are removed, as will be within the ability of the person skilled in the art. Alternatively, substitutions or insertions may be designed so as to introduce one or more sites for attachment of functional groups (as described herein), for example to allow site-specific pegylation (again as described herein).

[0583] As can be seen from the data on the V_{HH} entropy and V_{HH} variability given in Tables A-5 to A-8 above, some amino acid residues in the framework regions are more conserved than others. Generally, although the invention in its broadest sense is not limited thereto, any substitutions, deletions or insertions are preferably made at positions that are less conserved. Also, generally, amino acid substitutions are preferred over amino acid deletions or insertions.

[0584] The analogs are preferably such that they can bind to Integrins with an affinity (suitably measured and/or expressed as a K_{D}-value (actual or apparent), a K_{A}-value (actual or apparent), a kₒₙ-rate and/or a k_{off}-rate, or alternatively as an IC₅₀ value, as further described herein) that is as defined herein for the Nanobodies of the invention.

[0585] The analogs are preferably also such that they retain the favourable properties the Nanobodies, as described herein.

[0586] Also, according to one preferred aspect, the analogs have a degree of sequence identity of at least 70%, preferably at least 80%, more preferably at least 90%, such as at least 95% or 99% or more; and/or preferably have at most 20, preferably at most 10, even more preferably at most 5, such as 4, 3, 2 or only 1 amino acid difference (as defined herein), with one of the Nanobodies of SEQ ID NOs: 1316 to 1476, and SEQ ID NO: 1485, 1486, and 1487 (see Table 1).

[0587] Also, the framework sequences and CDR□s of the analogs are preferably such that they are in accordance with the preferred aspects defined herein. More generally, as described herein, the analogs will have (a) a Q at position 108; and/or (b) a charged amino acid or a cysteine residue at position 45 and preferably an E at position 44, and more preferably E at position 44 and R at position 45; and/or (c) P, R or S at position 103.

[0588] One preferred class of analogs of the Nanobodies of the invention comprise Nanobodies that have been humanized (i.e. compared to the sequence of a naturally occurring Nanobody of the invention). As mentioned in the background art cited herein, such humanization generally involves replacing one or more amino acid residues in the sequence of a naturally occurring V_{HH} with the amino acid residues that occur at the same position in a human V_{H} domain, such as a human V_{H}3 domain. Examples of possible humanizing substitutions or combinations of humanizing substitutions will be clear to the skilled person, for example from the Tables herein, from the possible humanizing substitutions mentioned in the background art cited herein, and/or from a comparison between the sequence of a Nanobody and the sequence of a naturally occurring human V_{H} domain.

[0589] The humanizing substitutions should be chosen such that the resulting humanized Nanobodies still retain the favourable properties of Nanobodies as defined herein, and more preferably such that they are as described for analogs in the preceding paragraphs. A skilled person will generally be able to determine and select suitable humanizing substitutions or suitable combinations of humanizing substitutions, based on the disclosure herein and optionally after a limited degree of routine experimentation, which may for example involve introducing a limited number of possible humanizing substitutions and determining their influence on the properties of the Nanobodies thus obtained.

[0590] Generally, as a result of humanization, the Nanobodies of the invention may become more □ [symbol] □, while still retaining the favorable properties of the Nanobodies of the invention as described herein. As a result, such humanized Nanobodies may have several advantages, such as a reduced immunogenicity, compared to the corresponding naturally occurring V_{HH} domains. Again, based on the disclosure herein and optionally after a limited degree of routine experimentation, the skilled person will be able to select humanizing substitutions or suitable combinations of humanizing substitutions which optimize or achieve a desired or suitable balance between the favourable properties provided by the humanizing substitutions on the one hand and the favourable properties of naturally occurring V_{HH} domains on the other hand.

[0591] The Nanobodies of the invention may be suitably humanized at any framework residue(s), such as at one or more Hallmark residues (as defined herein) or at one or more other framework residues (i.e. non-Hallmark residues) or any suitable combination thereof. One preferred humanizing substitution for Nanobodies of the □P [symbol] group□ or the □ KERE group□ is Q108 into L108. Nanobodies of the □GLEW class□ may also be hurr [symbol] by a Q108 into L108 substitution, provided at least one of the other Hallmark residues contains a camelid (camelizing) substitution (as defined herein). For example, as mentioned above, one particularly preferred class of humanized Nanobodies has GLEW or a GLEW-like sequence at positions 44-47; P, R or S (and in particular R) at position 103, and an L at position 108.

[0592] The humanized and other analogs, and nucleic acid sequences encoding the same, can be provided in any manner known per se, for example using one or more of the techniques mentioned on pages 103 and 104 of WO 08/020,079.

[0593] As mentioned there, it will be also be clear to the skilled person that the Nanobodies of the invention (including their analogs) can be designed and/or prepared starting from human V_{H} sequences (i.e. amino acid sequences or the corresponding nucleotide sequences), such as for example from human V_{H}3 sequences such as DP-47, DP-51 or DP-29, i.e. by introducing one or more camelizing substitutions (i.e. changing one or more amino acid residues in the amino acid sequence of said human V_{H} domain into the amino acid residues that occur at the corresponding position in a V_{HH} domain), so as to provide the sequence of a Nanobody of the invention and/or so as to confer the favourable properties of a Nanobody to the sequence thus obtained. Again, this can generally be performed using the various methods and techniques referred to in the previous paragraph, using an amino acid sequence and/or nucleotide sequence for a human V_{H} domain as a starting point.

[0594] Some preferred, but non-limiting camelizing substitutions can be derived from Tables A-5□A-8. It will also be clear that camelizing substitutions at one or more of the Hallmark residues will generally have a greater influence on the desired properties than substitutions at one or more of the other amino acid positions, although both and any suitable combination thereof are included within the scope of the invention. For example, it is possible to introduce one or more camelizing substitutions that already confer at least some the desired properties, and then to introduce further camelizing substitutions that either further improve said properties and/or confer additional favourable properties. Again, the skilled person will generally be able to determine and select suitable camelizing substitutions or suitable combinations of camelizing substitutions, based on the disclosure herein and optionally after a limited degree of routine experimentation, which may for example involve introducing a limited number of possible camelizing substitutions and determining whether the favourable properties of Nanobodies are obtained or improved (i.e. compared to the original V_{H} domain). Generally, however, such camelizing substitutions are preferably such that the resulting an amino acid sequence at least contains (a) a Q at position 108; and/or (b) a charged amino acid or a cysteine residue at position 45 and preferably also an E at position 44, and more preferably E at position 44 and R at position 45; and/or (c) P, R or S at position 103; and optionally one or more further camelizing substitutions. More preferably, the camelizing substitutions are such that they result in a Nanobody of the invention and/or in an analog thereof (as defined herein), such as in a humanized analog and/or preferably in an analog that is as defined in the preceding paragraphs.

[0595] As will also be clear from the disclosure herein, it is also within the scope of the invention to use parts or fragments, or combinations of two or more parts or fragments, of the Nanobodies of the invention as defined herein, and in particular parts or fragments of the Nanobodies of SEQ ID NO□s: 1316 to 1476, and SEQ ID NO: 1485, 1486, and 1487 (see Table 1). Thus, according to one aspect of the invention, the term □Nanobody of the invention□in its broadest [symbol] covers such parts or fragments.

[0596] Generally, such parts or fragments of the Nanobodies of the invention (including analogs thereof) have amino acid sequences in which, compared to the amino acid sequence of the corresponding full length Nanobody of the invention (or analog thereof), one or more of the amino acid residues at the N-terminal end, one or more amino acid residues at the C-terminal end, one or more contiguous internal amino acid residues, or any combination thereof, have been deleted and/or removed.

[0597] The parts or fragments are preferably such that they can bind to Integrins with an affinity (suitably measured and/or expressed as a K_{D}-value (actual or apparent), a K_{A}-value (actual or apparent), a kₒₙ-rate and/or a k_{off}-rate, or alternatively as an IC₅₀ value, as further described herein) that is as defined herein for the Nanobodies of the invention.

[0598] Any part or fragment is preferably such that it comprises at least 10 contiguous amino acid residues, preferably at least 20 contiguous amino acid residues, more preferably at least 30 contiguous amino acid residues, such as at least 40 contiguous amino acid residues, of the amino acid sequence of the corresponding full length Nanobody of the invention.

[0599] Also, any part or fragment is such preferably that it comprises at least one of CDR1, CDR2 and/or CDR3 or at least part thereof (and in particular at least CDR3 or at least part thereof). More preferably, any part or fragment is such that it comprises at least one of the CDR□s (and preferably at least CDR3 part thereof) and at least one other CDR (i.e. CDR1 or CDR2) or at least part thereof, preferably connected by suitable framework sequence(s) or at least part thereof. More preferably, any part or fragment is such that it comprises at least one of the CDR□s (and preferably at least CDR3 or part thereof) and at least part of the two remaining CDR□s, again preferably connected by suitable framework sequence(s) or at least part thereof.

[0600] According to another particularly preferred, but non-limiting aspect, such a part or fragment comprises at least CDR3, such as FR3, CDR3 and FR4 of the corresponding full length Nanobody of the invention, i.e. as for example described in the International application WO 03/050531 (Lasters et al.).

[0601] As already mentioned above, it is also possible to combine two or more of such parts or fragments (i.e. from the same or different Nanobodies of the invention), i.e. to provide an analog (as defined herein) and/or to provide further parts or fragments (as defined herein) of a Nanobody of the invention. It is for example also possible to combine one or more parts or fragments of a Nanobody of the invention with one or more parts or fragments of a human V_{H} domain.

[0602] According to one preferred aspect, the parts or fragments have a degree of sequence identity of at least 50%, preferably at least 60%, more preferably at least 70%, even more preferably at least 80%, such as at least 90%, 95% or 99% or more with one of the Nanobodies of SEQ ID NOs 1316 to 1476, and SEQ ID NO: 1485, 1486, and 1487 (see Table 1).

[0603] The parts and fragments, and nucleic acid sequences encoding the same, can be provided and optionally combined in any manner known per se. For example, such parts or fragments can be obtained by inserting a stop codon in a nucleic acid that encodes a full-sized Nanobody of the invention, and then expressing the nucleic acid thus obtained in a manner known per se (e.g. as described herein). Alternatively, nucleic acids encoding such parts or fragments can be obtained by suitably restricting a nucleic acid that encodes a full-sized Nanobody of the invention or by synthesizing such a nucleic acid in a manner known per se. Parts or fragments may also be provided using techniques for peptide synthesis known per se.

[0604] The invention in its broadest sense also comprises derivatives of the Nanobodies of the invention. Such derivatives can generally be obtained by modification, and in particular by chemical and/or biological (e.g. enzymatical) modification, of the Nanobodies of the invention and/or of one or more of the amino acid residues that form the Nanobodies of the invention.

[0605] Examples of such modifications, as well as examples of amino acid residues within the Nanobody sequence that can be modified in such a manner (i.e. either on the protein backbone but preferably on a side chain), methods and techniques that can be used to introduce such modifications and the potential uses and advantages of such modifications will be clear to the skilled person.

[0606] For example, such a modification may involve the introduction (e.g. by covalent linking or in an other suitable manner) of one or more functional groups, residues or moieties into or onto the Nanobody of the invention, and in particular of one or more functional groups, residues or moieties that confer one or more desired properties or functionalities to the Nanobody of the invention. Example of such functional groups will be clear to the skilled person.

[0607] For example, such modification may comprise the introduction (e.g. by covalent binding or in any other suitable manner) of one or more functional groups that increase the half-life, the solubility and/or the absorption of the Nanobody of the invention, that reduce the immunogenicity and/or the toxicity of the Nanobody of the invention, that eliminate or attenuate any undesirable side effects of the Nanobody of the invention, and/or that confer other advantageous properties to and/or reduce the undesired properties of the Nanobodies and/or polypeptides of the invention; or any combination of two or more of the foregoing. Examples of such functional groups and of techniques for introducing them will be clear to the skilled person, and can generally comprise all functional groups and techniques mentioned in the general background art cited hereinabove as well as the functional groups and techniques known per se for the modification of pharmaceutical proteins, and in particular for the modification of antibodies or antibody fragments (including ScFv□s and single domain antibodies), for which reference is for example made to Remington's Pharmaceutical Sciences, 16th ed., Mack Publishing Co., Easton, Pa. (1980). Such functional groups may for example be linked directly (for example covalently) to a Nanobody of the invention, or optionally via a suitable linker or spacer, as will again be clear to the skilled person.

[0608] One of the most widely used techniques for increasing the half-life and/or reducing the immunogenicity of pharmaceutical proteins comprises attachment of a suitable pharmacologically acceptable polymer, such as poly(ethyleneglycol) (PEG) or derivatives thereof (such as methoxypoly(ethyleneglycol) or mPEG). Generally, any suitable form of pegylation can be used, such as the pegylation used in the art for antibodies and antibody fragments (including but not limited to (single) domain antibodies and ScFv s); reference is made to for example Chapman, Nat. Biotcchnol., 54, 531-545 (2002); by Veronese and Harris, Adv. Drug Deliv. Rev. 54, 453-456 (2003), by Harris and Chess, Nat. Rev. Drug. Discov., 2, (2003) and in WO 04/060965. Various reagents for pegylation of proteins are also commercially available, for example from Nektar Therapeutics, USA.

[0609] Preferably, site-directed pegylation is used, in particular via a cysteine-residue (see for example Yang et al., Protein Engineering, 16, 10, 761-770 (2003). For example, for this purpose, PEG may be attached to a cysteine residue that naturally occurs in a Nanobody of the invention, a Nanobody of the invention may be modified so as to suitably introduce one or more cysteine residues for attachment of PEG, or an amino acid sequence comprising one or more cysteine residues for attachment of PEG may be fused to the N- and/or C-terminus of a Nanobody of the invention, all using techniques of protein engineering known per se to the skilled person.

[0610] Preferably, for the Nanobodies and proteins of the invention, a PEG is used with a molecular weight of more than 5000, such as more than 10,000 and less than 200,000, such as less than 100,000; for example in the range of 20,000-80,000.

[0611] Another, usually less preferred modification comprises N-linked or O-linked glycosylation, usually as part of co-translational and/or post-translational modification, depending on the host cell used for expressing the Nanobody or polypeptide of the invention.

[0612] Yet another modification may comprise the introduction of one or more detectable labels or other signal-generating groups or moieties, depending on the intended use of the labelled Nanobody. Suitable labels and techniques for attaching, using and detecting them will be clear to the skilled person, and for example include, but are not limited to, the fluorescent labels, phosphorescent labels, chemiluminescent labels, bioluminescent labels, radio-isotopes, metals, metal chelates, metallic cations, chromophores and enzymes, such as those mentioned on page 109 of WO 08/020,079—Other suitable labels will be clear to the skilled person, and for example include moieties that can be detected using NMR or ESR spectroscopy.

[0613] Such labelled Nanobodies and polypeptides of the invention may for example be used for in vitro, in vivo or in situ assays (including immunoassays known per se such as ELISA, RIA, EIA and other □sandwich assays□, etc.) as well as in vivo diagnostic and imaging purposes, depending on the choice of the specific label.

[0614] As will be clear to the skilled person, another modification may involve the introduction of a chelating group, for example to chelate one of the metals or metallic cations referred to above. Suitable chelating groups for example include, without limitation, diethyl-enetriaminepentaacetic acid (DTPA) or ethylenediaminetetraacetic acid (EDTA).

[0615] Yet another modification may comprise the introduction of a functional group that is one part of a specific binding pair, such as the biotin-(strept)avidin binding pair. Such a functional group may be used to link the Nanobody of the invention to another protein, polypeptide or chemical compound that is bound to the other half of the binding pair, i.e. through formation of the binding pair. For example, a Nanobody of the invention may be conjugated to biotin, and linked to another protein, polypeptide, compound or carrier conjugated to avidin or streptavidin. For example, such a conjugated Nanobody may be used as a reporter, for example in a diagnostic system where a detectable signal-producing agent is conjugated to avidin or streptavidin. Such binding pairs may for example also be used to bind the Nanobody of the invention to a carrier, including carriers suitable for pharmaceutical purposes. One non-limiting example are the liposomal formulations described by Cao and Suresh, Journal of Drug Targetting, 8, 4, 257 (2000). Such binding pairs may also be used to link a therapeutically active agent to the Nanobody of the invention.

[0616] For some applications, in particular for those applications in which it is intended to kill a cell that expresses the target against which the Nanobodies of the invention are directed (e.g. in the treatment of cancer), or to reduce or slow the growth and/or proliferation such a cell, the Nanobodies of the invention may also be linked to a toxin or to a toxic residue or moiety. Examples of toxic moieties, compounds or residues which can be linked to a Nanobody of the invention to provide □for example □a cytotoxic compound will be clear to the skilled person and can for example be found in the prior art cited above and/or in the further description herein. One example is the so-called ADEPT™ technology described in WO 03/055527.

[0617] Other potential chemical and enzymatical modifications will be clear to the skilled person. Such modifications may also be introduced for research purposes (e.g. to study function-activity relationships). Reference is for example made to Lundblad and Bradshaw, Biotechnol. Appl. Biochem., 26, 143-151 (1997).

[0618] Preferably, the derivatives are such that they bind to Integrins with an affinity (suitably measured and/or expressed as a K_{D}-value (actual or apparent), a K_{A}-value (actual or apparent), a kₒₙ-rate and/or a k_{off}-rate, or alternatively as an IC₅₀ value, as further described herein) that is as defined herein for the Nanobodies of the invention.

[0619] As mentioned above, the invention also relates to proteins or polypeptides that essentially consist of or comprise at least one Nanobody of the invention. By □essentially consist of□ is meant that the amino acid sequence of the polypeptide of the invention either is exactly the same as the amino acid sequence of a Nanobody of the invention or corresponds to the amino acid sequence of a Nanobody of the invention which has a limited number of amino acid residues, such as 1-20 amino acid residues, for example 1-10 amino acid residues and preferably 1-6 amino acid residues, such as 1, 2, 3, 4, 5 or 6 amino acid residues, added at the amino terminal end, at the carboxy terminal end, or at both the amino terminal end and the carboxy terminal end of the amino acid sequence of the Nanobody.

[0620] Said amino acid residues may or may not change, alter or otherwise influence the (biological) properties of the Nanobody and may or may not add further functionality to the Nanobody. For example, such amino acid residues:
[0621] can comprise an N-terminal Met residue, for example as result of expression in a heterologous host cell or host organism.
[0622] may form a signal sequence or leader sequence that directs secretion of the Nanobody from a host cell upon synthesis. Suitable secretory leader peptides will be clear to the skilled person, and may be as further described herein. Usually, such a leader sequence will be linked to the N-terminus of the Nanobody, although the invention in its broadest sense is not limited thereto;
[0623] may form a sequence or signal that allows the Nanobody to be directed towards and/or to penetrate or enter into specific organs, tissues, cells, or parts or compartments of cells, and/or that allows the Nanobody to penetrate or cross a biological barrier such as a cell membrane, a cell layer such as a layer of epithelial cells, a tumor including solid tumors, or the blood-brain-barrier. Examples of such amino acid sequences will be clear to the skilled person and include those mentioned in paragraph c) on page 112 of WO 08/020,079
[0624] may form a □tag□, for example an amino [symbol] residue that allows or facilitates the purification of the Nanobody, for example using affinity techniques directed against said sequence or residue. Thereafter, said sequence or residue may be removed (e.g. by chemical or enzymatical cleavage) to provide the Nanobody sequence (for this purpose, the tag may optionally be linked to the Nanobody sequence via a cleavable linker sequence or contain a cleavable motif). Some preferred, but non-limiting examples of such residues are multiple histidine residues, glutathione residues and a myc-tag (see for example SEQ ID NO:31 of WO 06/12282).
[0625] may be one or more amino acid residues that have been functionalized and/or that can serve as a site for attachment of functional groups. Suitable amino acid residues and functional groups will be clear to the skilled person and include, but are not limited to, the amino acid residues and functional groups mentioned herein for the derivatives of the Nanobodies of the invention.

[0626] According to another aspect, a polypeptide of the invention comprises a Nanobody of the invention, which is fused at its amino terminal end, at its carboxy terminal end, or both at its amino terminal end and at its carboxy terminal end to at least one further amino acid sequence, i.e. so as to provide a fusion protein comprising said Nanobody of the invention and the one or more further amino acid sequences. Such a fusion will also be referred to herein as a □Nanobody fusion □.

[0627] The one or more further amino acid sequence may be any suitable and/or desired amino acid sequences. The further amino acid sequences may or may not change, alter or otherwise influence the (biological) properties of the Nanobody, and may or may not add further functionality to the Nanobody or the polypeptide of the invention. Preferably, the further amino acid sequence is such that it confers one or more desired properties or functionalities to the Nanobody or the polypeptide of the invention.

[0628] For example, the further amino acid sequence may also provide a second binding site, which binding site may be directed against any desired protein, polypeptide, antigen, antigenic determinant or epitope (including but not limited to the same protein, polypeptide, antigen, antigenic determinant or epitope against which the Nanobody of the invention is directed, or a different protein, polypeptide, antigen, antigenic determinant or epitope).

[0629] Example of such amino acid sequences will be clear to the skilled person, and may generally comprise all amino acid sequences that are used in peptide fusions based on conventional antibodies and fragments thereof (including but not limited to ScFv□s and single domain antibodies). Reference is for example made to the review by Holliger and Hudson, Nature Biotechnology, 23, 9, 1126-1136 (2005).

[0630] For example, such an amino acid sequence may be an amino acid sequence that increases the half-life, the solubility, or the absorption, reduces the immunogenicity or the toxicity, eliminates or attenuates undesirable side effects, and/or confers other advantageous properties to and/or reduces the undesired properties of the polypeptides of the invention, compared to the Nanobody of the invention per se. Some non-limiting examples of such amino acid sequences are serum proteins, such as humanserum albumin (see for example WO 00/27435) or haptenic molecules (for example haptens that are recognized by circulating antibodies, see for example WO 98/22141).

[0631] In particular, it has been described in the art that linking fragments of immunoglobulins (such as V_{H} domains) to serum albumin or to fragments thereof can be used to increase the half-life. Reference is for made to WO 00/27435 and WO 01/077137). According to the invention, the Nanobody of the invention is preferably either directly linked to serum albumin (or to a suitable fragment thereof) or via a suitable linker, and in particular via a suitable peptide linked so that the polypeptide of the invention can be expressed as a genetic fusion (protein). According to one specific aspect, the Nanobody of the invention may be linked to a fragment of serum albumin that at least comprises the domain III of serum albumin or part thereof. Reference is for example made to WO 07/112,940 of Ablynx N.V

[0632] Alternatively, the further amino acid sequence may provide a second binding site or binding unit that is directed against a serum protein (such as, for example, human serum albumin or another serum protein such as IgG), so as to provide increased half-life in serum. Such amino acid sequences for example include the Nanobodies described below, as well as the small peptides and binding proteins described in WO 91/01743, WO 01/45746 and WO 02/076489 and the dAb□s described in WO 03/002609 and WO 04/003019. Reference is also made to Harmsen et al., Vaccine, 23 (41); 4926-42, 2005, as well as to EP 0 368 684, as well as to the following the U.S. provisional applications 60/843,349 (see also PCT/EP2007/059475), 60/850,774 (see also PCT/EP2007/060849), 60/850,775 (see also PCT/EP2007/060850) by Ablynx N.V. mentioned herein and US provisional application of Ablynx N.V. entitled “Peptides capable of binding to serum proteins □ filed on Dec. 5, 2006 ((see also PCT/EP2007/063348).

[0633] Such amino acid sequences may in particular be directed against serum albumin (and more in particular human serum albumin) and/or against IgG (and more in particular human IgG). For example, such amino acid sequences may be amino acid sequences that are directed against (human) serum albumin and amino acid sequences that can bind to amino acid residues on (human) serum albumin that are not involved in binding of serum albumin to FcRn (see for example WO 06/0122787) and/or amino acid sequences that are capable of binding to amino acid residues on serum albumin that do not form part of domain III of serum albumin (see again for example WO 06/0122787); amino acid sequences that have or can provide an increased half-life (see for example WO 08/028,977 by Ablynx N.V.); amino acid sequences against human serum albumin that are cross-reactive with scrum albumin from at least one species of mammal, and in particular with at least one species of primate (such as, without limitation, monkeys from the genus Macaca (such as, and in particular, cynomologus monkeys (Macaca fascicularis) and/or rhesus monkeys (Macaca mulatta)) and baboon (Papio ursinus), reference is again made to the U.S. provisional application 60/843,349 and PCT/EP2007/059475); amino acid sequences that can bind to serum albumin in a pH independent manner (see for example the U.S. provisional application 60/850,774 by Ablynx N.V. entitled □Amino acid sequences that bind to serum proteins in a manner that is essentially independent of the pH, compounds comprising the same, and uses thereof□, filed on Oct. 11, 2006; see also and PCT/EP2007/059475) and/or amino acid sequences that are conditional binders (see for example the U.S. provisional application 60/850,775 by Ablynx N.V. entitled □Amino acid sequences that bind to a desired molecule in a conditional manner□, filed on Oct. 11, 2006; see also PCT/EP2007/060850).

[0634] According to another aspect, the one or more further amino acid sequences may comprise one or more parts, fragments or domains of conventional 4-chain antibodies (and in particular human antibodies) and/or of heavy chain antibodies. For example, although usually less preferred, a Nanobody of the invention may be linked to a conventional (preferably human) V_{H} or V_{L}, domain or to a natural or synthetic analog of a V_{H} or V_{L} domain, again optionally via a linker sequence (including but not limited to other (single) domain antibodies, such as the dAb□s described by Ward et al.).

[0635] The at least one Nanobody may also be linked to one or more (preferably human) C_{H}1, C_{H}2 and/or C_{H}3 domains, optionally via a linker sequence. For instance, a Nanobody linked to a suitable C_{H}1 domain could for example be used—together with suitable light chains—to generate antibody fragments/structures analogous to conventional Fab fragments or F(ab□₂ fragments, but in which one or (in case of an F(ab □₂ fragment) one or both of the conventional V_{H} domains have been replaced by a Nanobody of the invention. Also, two Nanobodies could be linked to a C_{H}3 domain (optionally via a linker) to provide a construct with increased half-life in vivo.

[0636] According to one specific aspect of a polypeptide of the invention, one or more Nanobodies of the invention may be linked (optionally via a suitable linker or hinge region) to one or more constant domains (for example, 2 or 3 constant domains that can be used as part of/to form an Fc portion), to an Fc portion and/or to one or more antibody parts, fragments or domains that confer one or more effector functions to the polypeptide of the invention and/or may confer the ability to bind to one or more Fc receptors. For example, for this purpose, and without being limited thereto, the one or more further amino acid sequences may comprise one or more C_{H}2 and/or C_{H}3 domains of an antibody, such as from a heavy chain antibody (as described herein) and more preferably from a conventional human 4-chain antibody; and/or may form (part of) and Fc region, for example from IgG (e.g. from IgG1, IgG2, IgG3 or IgG4), from IgE or from another human Ig such as IgA, IgD or IgM. For example, WO 94/04678 describes heavy chain antibodies comprising a Camelid V_{HH} domain or a humanized derivative thereof (i.e. a Nanobody), in which the Camelidae C_{H}2 and/or C_{H}3 domain have been replaced by human C_{H}2 and C_{H}3 domains, so as to provide an immunoglobulin that consists of 2 heavy chains each comprising a Nanobody and human C_{H}2 and C_{H}3 domains (but no C_{H}1 domain), which immunoglobulin has the effector function provided by the C_{H}2 and C_{H}3 domains and which immunoglobulin can function without the presence of any light chains. Other amino acid sequences that can be suitably linked to the Nanobodies of the invention so as to provide an effector function will be clear to the skilled person, and may be chosen on the basis of the desired effector function(s). Reference is for example made to WO 04/058820, WO 99/42077, WO 02/056910 and WO 05/017148, as well as the review by Holliger and Hudson, supra; and to the non-prepublished US provisional application by Ablynx N.V. entitled □Constructs comprising single variable domains and an Fc portion derived from IgE□ which has a filing date of Dec. 4, 2007. Coupling of a Nanobody of the invention to an Fc portion may also lead to an increased half-life, compared to the corresponding Nanobody of the invention. For some applications, the use of an Fc portion and/or of constant domains (i.e. C_{H}2 and/or C_{H}3 domains) that confer increased half-life without any biologically significant effector function may also be suitable or even preferred. Other suitable constructs comprising one or more Nanobodies and one or more constant domains with increased half-life in vivo will be clear to the skilled person, and may for example comprise two Nanobodies linked to a C_{H}3 domain, optionally via a linker sequence. Generally, any fusion protein or derivatives with increased half-life will preferably have a molecular weight of more than 50 kD, the cut-off value for renal absorption.

[0637] In another one specific, but non-limiting, aspect, in order to form a polypeptide of the invention, one or more amino acid sequences of the invention may be linked (optionally via a suitable linker or hinge region) to naturally occurring, synthetic or semisynthetic constant domains (or analogs, variants, mutants, parts or fragments thereof) that have a reduced (or essentially no) tendency to self-associate into dimers (i.e. compared to constant domains that naturally occur in conventional 4-chain antibodies). Such monomeric (i.e. not self-associating) Fc chain variants, or fragments thereof, will be clear to the skilled person. For example, Helm et al., J Biol Chem 1996 271 7494, describe monomeric Fee chain variants that can be used in the polypeptide chains of the invention.

[0638] Also, such monomeric Fc chain variants are preferably such that they are still capable of binding to the complement or the relevant Fc receptor(s) (depending on the Fc portion from which they are derived), and/or such that they still have some or all of the effector functions of the Fc portion from which they are derived (or at a reduced level still suitable for the intended use). Alternatively, in such a polypeptide chain of the invention, the monomeric Fc chain may be used to confer increased half-life upon the polypeptide chain, in which case the monomeric Fc chain may also have no or essentially no effector functions.

[0639] Bivalent/multivalent, bispecific/multispecific or biparatopic/multiparatopic polypeptides of the invention may also be linked to Fc portions, in order to provide polypeptide constructs of the type that is described in the non-prepublished U.S. provisional application US 61/005,331 entitled □immunoglobulin construct □ filed Dec. 4, 2007.

[0640] The further amino acid sequences may also form a signal sequence or leader sequence that directs secretion of the Nanobody or the polypeptide of the invention from a host cell upon synthesis (for example to provide a pre-, pro- or prepro-form of the polypeptide of the invention, depending on the host cell used to express the polypeptide of the invention).

[0641] The further amino acid sequence may also form a sequence or signal that allows the Nanobody or polypeptide of the invention to be directed towards and/or to penetrate or enter into specific organs, tissues, cells, or parts or compartments of cells, and/or that allows the Nanobody or polypeptide of the invention to penetrate or cross a biological barrier such as a cell membrane, a cell layer such as a layer of epithelial cells, a tumor including solid tumors, or the blood-brain-barrier. Suitable examples of such amino acid sequences will be clear to the skilled person, and for example include, but are not limited to, those mentioned on page 118 of WO 08/020,079. For some applications, in particular for those applications in which it is intended to kill a cell that expresses the target against which the Nanobodies of the invention are directed (e.g. in the treatment of cancer), or to reduce or slow the growth and/or proliferation of such a cell, the Nanobodies of the invention may also be linked to a (cyto)toxic protein or polypeptide. Examples of such toxic proteins and polypeptides which can be linked to a Nanobody of the invention to provide □for example□ a cytotoxic polypeptide of the invention will be clear to the skilled person and can for example be found in the prior art cited above and/or in the further description herein. One example is the so-called ADEPT™ technology described in WO 03/055527.

[0642] According to one preferred, but non-limiting aspect, said one or more further amino acid sequences comprise at least one further Nanobody, so as to provide a polypeptide of the invention that comprises at least two, such as three, four, five or more Nanobodies, in which said Nanobodies may optionally be linked via one or more linker sequences (as defined herein). As described on pages 119 and 120 of WO 08/020,079, polypeptides of the invention that comprise two or more Nanobodies, of which at least one is a Nanobody of the invention, will also be referred to herein as □multivalent□ polypeptides of the invention, and the Nanobodies present in such polypeptides will also be referred to herein as being in a □multivalent format□. For example □□ [symbol] trivalent□ polypeptides of the invention may be as further described on pages 119 and 120 of WO 08/020,079.

[0643] Polypeptides of the invention that contain at least two Nanobodies, in which at least one Nanobody is directed against a first antigen (i.e. against Integrins,) and at least one Nanobody is directed against a second antigen (i.e. different from Integrins,), will also be referred to as □multispecific□ polypeptides of the invention, and the Nanobodies present in such polypeptides will also be referred to herein as being in a □multispecific format□. Thus, for example, a □bispecific□ polypeptide of the invention is a polypeptide that comprises at least one Nanobody directed against a first antigen (i.e. Integrins,) and at least one further Nanobody directed against a second antigen (i.e. different from Integrins,), whereas a □trispecific□ polypeptide of the invention is a polypeptide that comprises at least one Nanobody directed against a first antigen (i.e. Integrins,), at least one further Nanobody directed against a second antigen (i.e. different from Integrins,) and at least one further Nanobody directed against a third antigen (i.e. different from both Integrins, and the second antigen); etc.

[0644] Accordingly, in its simplest form, a bispecific polypeptide of the invention is a bivalent polypeptide of the invention (as defined herein), comprising a first Nanobody directed against Integrins, and a second Nanobody directed against a second antigen, in which said first and second Nanobody may optionally be linked via a linker sequence (as defined herein); whereas a trispecific polypeptide of the invention in its simplest form is a trivalent polypeptide of the invention (as defined herein), comprising a first Nanobody directed against Integrins, a second Nanobody directed against a second antigen and a third Nanobody directed against a third antigen, in which said first, second and third Nanobody may optionally be linked via one or more, and in particular one and more, in particular two, linker sequences.

[0645] However, as will be clear from the description hereinabove, the invention is not limited thereto, in the sense that a multispecific polypeptide of the invention may comprise at least one Nanobody against Integrins, and any number of Nanobodies directed against one or more antigens different from Integrins.

[0646] Furthermore, although it is encompassed within the scope of the invention that the specific order or arrangement of the various Nanobodies in the polypeptides of the invention may have some influence on the properties of the final polypeptide of the invention (including but not limited to the affinity, specificity or avidity for Integrins, or against the one or more other antigens), said order or arrangement is usually not critical and may be suitably chosen by the skilled person, optionally after some limited routine experiments based on the disclosure herein. Thus, when reference is made to a specific multivalent or multispccific polypeptide of the invention, it should be noted that this encompasses any order or arrangements of the relevant Nanobodies, unless explicitly indicated otherwise.

[0647] Finally, it is also within the scope of the invention that the polypeptides of the invention contain two or more Nanobodies and one or more further amino acid sequences (as mentioned herein).

[0648] For multivalent and multispecific polypeptides containing one or more V_{HH} domains and their preparation, reference is also made to Conrath et al., J. Biol. Chem., Vol. 276, 10. 7346-7350, 2001; Muyldermans, Reviews in Molecular Biotechnology 74 (2001), 277-302; as well as to for example WO 96/34103 and WO 99/23221. Some other examples of some specific multispecific and/or multivalent polypeptide of the invention can be found in the applications by Ablynx N.V. referred to herein.

[0649] One preferred, but non-limiting example of a multispecific polypeptide of the invention comprises at least one Nanobody of the invention and at least one Nanobody that provides for an increased half-life. Such Nanobodies may for example be Nanobodies that are directed against a serum protein, and in particular a human serum protein, such as human serum albumin, thyroxine-binding protein, (human) transferrin, fibrinogen, an immunoglobulin such as IgG, IgE or IgM, or against one of the serum proteins listed in WO 04/003019. Of these, Nanobodies that can bind to serum albumin (and in particular human serum albumin) or to IgG (and in particular human IgG, see for example Nanobody VH-1 described in the review by Muyldermans, supra) are particularly preferred (although for example, for experiments in mice or primates, Nanobodies against or cross-reactive with mouse serum albumin (MSA) or serum albumin from said primate, respectively, can be used. However, for pharmaceutical use, Nanobodies against human serum albumin or human IgG will usually be preferred). Nanobodies that provide for increased half-life and that can be used in the polypeptides of the invention include the Nanobodies directed against serum albumin that are described in WO 04/041865, in WO 06/122787 and in the further patent applications by Ablynx N.V., such as those mentioned above.

[0650] For example, the some preferred Nanobodies that provide for increased half-life for use in the present invention include Nanobodies that can bind to amino acid residues on (human) serum albumin that are not involved in binding of serum albumin to FcRn (see for example WO 06/0122787); Nanobodies that are capable of binding to amino acid residues on serum albumin that do not form part of domain III of serum albumin (see for example WO 06/0122787); Nanobodies that have or can provide an increased half-life (see for example the U.S. provisional application 60/843,349 by Ablynx N.V mentioned herein; see also PCT/EP2007/059475); Nanobodies against human serum albumin that are cross-reactive with serum albumin from at least one species of mammal, and in particular with at least one species of primate (such as, without limitation, monkeys from the genus Macaca (such as, and in particular, cynomologus monkeys (Macaca fascicularis) and/or rhesus monkeys (Macaca mulatta)) and baboon (Papio ursinus)) (see for example the U.S. provisional application 60/843,349 by Ablynx N.V; see also PCT/EP2007/059475)); Nanobodies that can bind to serum albumin in a pH independent manner (see for example the U.S. provisional application 60/850,774 by Ablynx N.V. mentioned herein) and/or Nanobodies that are conditional binders (see for example the U.S. provisional application 60/850,775 by Ablynx N.V.; see also PCT/EP2007/060850).

[0651] Some particularly preferred Nanobodies that provide for increased half-life and that can be used in the polypeptides of the invention include the Nanobodies ALB-1 to ALB-10 disclosed in WO 06/122787 (see Tables II and III) of which ALB-8 (SEQ ID NO: 62 in WO 06/122787) is particularly preferred.

[0652] According to a specific, but non-limiting aspect of the invention, the polypeptides of the invention contain, besides the one or more Nanobodies of the invention, at least one Nanobody against human serum albumin.

[0653] Generally, any polypeptides of the invention with increased half-life that contain one or more Nanobodies of the invention, and any derivatives of Nanobodies of the invention or of such polypeptides that have an increased half-life, preferably have a half-life that is at least 1.5 times, preferably at least 2 times, such as at least 5 times, for example at least 10 times or more than 20 times, greater than the half-life of the corresponding Nanobody of the invention per se. For example, such a derivative or polypeptides with increased half-life may have a half-life that is increased with more than 1 hours, preferably more than 2 hours, more preferably more than 6 hours, such as more than 12 hours, or even more than 24, 48 or 72 hours, compared to the corresponding Nanobody of the invention per se.

[0654] In a preferred, but non-limiting aspect of the invention, such derivatives or polypeptides may exhibit a serum half-life in human of at least about 12 hours, preferably at least 24 hours, more preferably at least 48 hours, even more preferably at least 72 hours or more. For example, such derivatives or polypeptides may have a half-life of at least 5 days (such as about 5 to 10 days), preferably at least 9 days (such as about 9 to 14 days), more preferably at least about 10 days (such as about 10 to 15 days), or at least about 11 days (such as about 11 to 16 days), more preferably at least about 12 days (such as about 12 to 18 days or more), or more than 14 days (such as about 14 to 19 days).

[0655] According to one aspect of the invention the polypeptides are capable of binding to one or more molecules which can increase the half-life of the polypeptide in vivo.

[0656] The polypeptides of the invention are stabilised in vivo and their half-life increased by binding to molecules which resist degradation and/or clearance or sequestration. Typically, such molecules are naturally occurring proteins which themselves have a long half-life in vivo.

[0657] Another preferred, but non-limiting example of a multispecific polypeptide of the invention comprises at least one Nanobody of the invention and at least one Nanobody that directs the polypeptide of the invention towards, and/or that allows the polypeptide of the invention to penetrate or to enter into specific organs, tissues, cells, or parts or compartments of cells, and/or that allows the Nanobody to penetrate or cross a biological barrier such as a cell membrane, a cell layer such as a layer of epithelial cells, a tumor including solid tumors, or the blood-brain-barrier. Examples of such Nanobodies include Nanobodies that are directed towards specific cell-surface proteins, markers or epitopes of the desired organ, tissue or cell (for example cell-surface markers associated with tumor cells), and the single-domain brain targeting antibody fragments described in WO 02/057445 and WO 06/040153, of which FC44 (SEQ ID NO: 189 of WO 06/040153) and FC5 (SEQ ID NO: 190 of WO 06/040154) are preferred examples.

[0658] In the polypeptides of the invention, the one or more Nanobodies and the one or more polypeptides may be directly linked to each other (as for example described in WO 99/23221) and/or may be linked to each other via one or more suitable spacers or linkers, or any combination thereof.

[0659] Suitable spacers or linkers for use in multivalent and multispecific polypeptides will be clear to the skilled person, and may generally be any linker or spacer used in the art to link amino acid sequences. Preferably, said linker or spacer is suitable for use in constructing proteins or polypeptides that are intended for pharmaceutical use.

[0660] Some particularly preferred spacers include the spacers and linkers that are used in the art to link antibody fragments or antibody domains. These include the linkers mentioned in the general background art cited above, as well as for example linkers that are used in the art to construct diabodies or ScFv fragments (in this respect, however, its should be noted that, whereas in diabodies and in ScFv fragments, the linker sequence used should have a length, a degree of flexibility and other properties that allow the pertinent V_{H} and V_{L} domains to come together to form the complete antigen-binding site, there is no particular limitation on the length or the flexibility of the linker used in the polypeptide of the invention, since each Nanobody by itself forms a complete antigen-binding site).

[0661] For example, a linker may be a suitable amino acid sequence, and in particular amino acid sequences of between 1 and 50, preferably between 1 and 30, such as between 1 and 10 amino acid residues. Some preferred examples of such amino acid sequences include gly-ser linkers, for example of the type (glyₓser_{y})_{z}, such as (for example (gly₄ser)₃ or (gly₃ser₂)₃, as described in WO 99/42077 and the GS30, GS15, GS9 and GS7 linkers described in the applications by Ablynx mentioned herein (see for example WO 06/040153 and WO 06/122825), as well as hinge-like regions, such as the hinge regions of naturally occurring heavy chain antibodies or similar sequences (such as described in WO 94/04678).

[0662] Some other particularly preferred linkers are poly-alanine (such as AAA), as well as the linkers GS30 (SEQ ID NO: 85 in WO 06/122825) and GS9 (SEQ ID NO: 84 in WO 06/122825).

[0663] Other suitable linkers generally comprise organic compounds or polymers, in particular those suitable for use in proteins for pharmaceutical use. For instance, poly(ethyleneglycol) moieties have been used to link antibody domains, see for example WO 04/081026.

[0664] It is encompassed within the scope of the invention that the length, the degree of flexibility and/or other properties of the linker(s) used (although not critical, as it usually is for linkers used in ScFv fragments) may have some influence on the properties of the final polypeptide of the invention, including but not limited to the affinity, specificity or avidity for Integrins, or for one or more of the other antigens. Based on the disclosure herein, the skilled person will be able to determine the optimal linker(s) for use in a specific polypeptide of the invention, optionally after some limited routine experiments.

[0665] For example, in multivalent polypeptides of the invention that comprise Nanobodies directed against a multimeric antigen (such as a multimeric receptor or other protein), the length and flexibility of the linker are preferably such that it allows each Nanobody of the invention present in the polypeptide to bind to the antigenic determinant on each of the subunits of the multimer. Similarly, in a multispecific polypeptide of the invention that comprises Nanobodies directed against two or more different antigenic determinants on the same antigen (for example against different epitopes of an antigen and/or against different subunits of a multimeric receptor, channel or protein), the length and flexibility of the linker are preferably such that it allows each Nanobody to bind to its intended antigenic determinant. Again, based on the disclosure herein, the skilled person will be able to determine the optimal linker(s) for use in a specific polypeptide of the invention, optionally after some limited routine experiments.

[0666] It is also within the scope of the invention that the linker(s) used confer one or more other favourable properties or functionality to the polypeptides of the invention, and/or provide one or more sites for the formation of derivatives and/or for the attachment of functional groups (e.g. as described herein for the derivatives of the Nanobodies of the invention). For example, linkers containing one or more charged amino acid residues (see Table A-2 above) can provide improved hydrophilic properties, whereas linkers that form or contain small epitopes or tags can be used for the purposes of detection, identification and/or purification. Again, based on the disclosure herein, the skilled person will be able to determine the optimal linkers for use in a specific polypeptide of the invention, optionally after some limited routine experiments.

[0667] Finally, when two or more linkers are used in the polypeptides of the invention, these linkers may be the same or different. Again, based on the disclosure herein, the skilled persdn will be able to determine the optimal linkers for use in a specific polypeptide of the invention, optionally after some limited routine experiments.

[0668] Usually, for easy of expression and production, a polypeptide of the invention will be a linear polypeptide. However, the invention in its broadest sense is not limited thereto. For example, when a polypeptide of the invention comprises three of more Nanobodies, it is possible to link them by use of a linker with three or more □arms□, which each□ arm□ linked to a Nanobody, so as to provide a □shaped□ construct. It is also possible, although usually less preferred, to use circular constructs.

[0669] The invention also comprises derivatives of the polypeptides of the invention, which may be essentially analogous to the derivatives of the Nanobodies of the invention, i.e. as described herein.

[0670] The invention also comprises proteins or polypeptides that □essentially consist□ of a polypeptide of the invention (in which the wording □essentially consist of essentially the same meaning as indicated hereinabove).

[0671] According to one aspect of the invention, the polypeptide of the invention is in essentially isolated from, as defined herein.

[0672] The amino acid sequences, Nanobodies, polypeptides and nucleic acids of the invention can be prepared in a manner known per se, as will be clear to the skilled person from the further description herein. For example, the Nanobodies and polypeptides of the invention can be prepared in any manner known per se for the preparation of antibodies and in particular for the preparation of antibody fragments (including but not limited to (single) domain antibodies and ScFv fragments). Some preferred, but non-limiting methods for preparing the amino acid sequences, Nanobodies, polypeptides and nucleic acids include the methods and techniques described herein.

[0673] As will be clear to the skilled person, one particularly useful method for preparing an amino acid sequence, Nanobody and/or a polypeptide of the invention generally comprises the steps of:
[0674] i) the expression, in a suitable host cell or host organism (also referred to herein as a □host of the invention□) or in another suitable expression system of a nucleic acid that encodes said amino acid sequence, Nanobody or polypeptide of the invention (also referred to herein as a □nucleic acid of the invention□), optionally followed by:
[0675] ii) isolating and/or purifying the amino acid sequence, Nanobody or polypeptide of the invention thus obtained.

[0676] In particular, such a method may comprise the steps of:
[0677] i) cultivating and/or maintaining a host of the invention under conditions that are such that said host of the invention expresses and/or produces at least one amino acid sequence, Nanobody and/or polypeptide of the invention; optionally followed by:
[0678] ii) isolating and/or purifying the amino acid sequence, Nanobody or polypeptide of the invention thus obtained.

[0679] A nucleic acid of the invention can be in the form of single or double stranded DNA or RNA, and is preferably in the form of double stranded DNA. For example, the nucleotide sequences of the invention may be genomic DNA, cDNA or synthetic DNA (such as DNA with a codon usage that has been specifically adapted for expression in the intended host cell or host organism).

[0680] According to one aspect of the invention, the nucleic acid of the invention is in essentially isolated from, as defined herein.

[0681] The nucleic acid of the invention may also be in the form of, be present in and/or be part of a vector, such as for example a plasmid, cosmid or YAC, which again may be in essentially isolated form.

[0682] The nucleic acids of the invention can be prepared or obtained in a manner known per se, based on the information on the amino acid sequences for the polypeptides of the invention given herein, and/or can be isolated from a suitable natural source. To provide analogs, nucleotide sequences encoding naturally occurring V_{HH} domains can for example be subjected to site-directed mutagenesis, so at to provide a nucleic acid of the invention encoding said analog. Also, as will be clear to the skilled person, to prepare a nucleic acid of the invention, also several nucleotide sequences, such as at least one nucleotide sequence encoding a Nanobody and for example nucleic acids encoding one or more linkers can be linked together in a suitable manner.

[0683] Techniques for generating the nucleic acids of the invention will be clear to the skilled person and may for instance include, but are not limited to, automated DNA synthesis; site-directed mutagenesis; combining two or more naturally occurring and/or synthetic sequences (or two or more parts thereof), introduction of mutations that lead to the expression of a truncated expression product; introduction of one or more restriction sites (e.g. to create cassettes and/or regions that may easily be digested and/or ligated using suitable restriction enzymes), and/or the introduction of mutations by means of a PCR reaction using one or more □mismatched□primers, using for example a sequence of a naturally [symbol] Integrins as a template. These and other techniques will be clear to the skilled person, and reference is again made to the standard handbooks, such as Sambrook et al. and Ausubel et al., mentioned above, as well as the Examples below.

[0684] The nucleic acid of the invention may also be in the form of, be present in and/or be part of a genetic construct, as will be clear to the person skilled in the art and as described on pages 131-134 of WO 08/020,079 (incorporated herein by reference). Such genetic constructs generally comprise at least one nucleic acid of the invention that is optionally linked to one or more elements of genetic constructs known per se, such as for example one or more suitable regulatory elements (such as a suitable promoter(s), enhancer(s), terminator(s), etc.) and the further elements of genetic constructs referred to herein. Such genetic constructs comprising at least one nucleic acid of the invention will also be referred to herein as □genetic constructs of the invention□.

[0685] The genetic constructs of the invention may be DNA or RNA, and are preferably double-stranded DNA. The genetic constructs of the invention may also be in a form suitable for transformation of the intended host cell or host organism, in a form suitable for integration into the genomic DNA of the intended host cell or in a form suitable for independent replication, maintenance and/or inheritance in the intended host organism. For instance, the genetic constructs of the invention may be in the form of a vector, such as for example a plasmid, cosmid, YAC, a viral vector or transposon. In particular, the vector may be an expression vector, i.e. a vector that can provide for expression in vitro and/or in vivo (e.g. in a suitable host cell, host organism and/or expression system).

[0686] In a preferred but non-limiting aspect, a genetic construct of the invention comprises
[0687] i) at least one nucleic acid of the invention; operably connected to
[0688] ii) one or more regulatory elements, such as a promoter and optionally a suitable terminator;
   and optionally also
[0689] iii) one or more further elements of genetic constructs known per se;

[0690] in which the terms □operably connected□ and □operably linked□ have the mean given on pages 131-134 of WO 08/020,079; and in which the □regulatory elements□, □promoter□, □terminator□ and □ [symbol] WO 08/020,079; and in which the genetic constructs may further be as described on pages 131-134 of WO 08/020,079.

[0691] The nucleic acids of the invention and/or the genetic constructs of the invention may be used to transform a host cell or host organism, i.e. for expression and/or production of the amino acid sequence, Nanobody or polypeptide of the invention. Suitable hosts or host cells will be clear to the skilled person, and may for example be any suitable fungal, prokaryotic or eukaryotic cell or cell line or any suitable fungal, prokaryotic or eukaryotic organism, for example those described on pages 134 and 135 of WO 08/020,079.; as well as all other hosts or host cells known per se for the expression and production of antibodies and antibody fragments (including but not limited to (single) domain antibodies and ScFv fragments), which will be clear to the skilled person. Reference is also made to the general background art cited hereinabove, as well as to for example WO 94/29457; WO 96/34103; WO 99/42077; Frenken et al., (1998), supra; Riechmann and Muyldermans, (1999), supra; van der Linden, (2000), supra; Thomassen et al., (2002), supra; Joosten et al., (2003), supra; Joosten et al., (2005), supra; and the further references cited herein.

[0692] The amino acid sequences, Nanobodies and polypeptides of the invention can also be introduced and expressed in one or more cells, tissues or organs of a multicellular organism, for example for prophylactic and/or therapeutic purposes (e.g. as a gene therapy), as further described on pages 135 and 136 of in WO 08/020,079 and in the further references cited in WO 08/020,079.

[0693] For expression of the Nanobodies in a cell, they may also be expressed as so-called □intrabodies□, as for example [symbol] 02610, WO 95/22618 and U.S. Pat. No. 7,004,940; WO 03/014960; in Cattaneo, A. & Biocca, S. (1997) Intracellular Antibodies: Development and Applications. Landes and Springer-Verlag; and in Kontermann, Methods 34, (2004), 163-170.

[0694] The amino acid sequences, Nanobodies and polypeptides of the invention can for example also be produced in the milk of transgenic mammals, for example in the milk of rabbits, cows, goats or sheep (see for example U.S. Pat. No. 6,741,957, U.S. Pat. No. 6,304,489 and U.S. Pat. No. 6,849,992 for general techniques for introducing transgenes into mammals), in plants or parts of plants including but not limited to their leaves, flowers, fruits, seed, roots or turbers (for example in tobacco, maize, soybean or alfalfa) or in for example pupae of the silkworm Bombix mori.

[0695] Furthermore, the amino acid sequences, Nanobodies and polypeptides of the invention can also be expressed and/or produced in cell-free expression systems, and suitable examples of such systems will be clear to the skilled person. Some preferred, but non-limiting examples include expression in the wheat germ system; in rabbit reticulocyte lysates; or in the E. coli Zubay system.

[0696] As mentioned above, one of the advantages of the use of Nanobodies is that the polypeptides based thereon can be prepared through expression in a suitable bacterial system, and suitable bacterial expression systems, vectors, host cells, regulatory elements, etc., will be clear to the skilled person, for example from the references cited above. It should however be noted that the invention in its broadest sense is not limited to expression in bacterial systems.

[0697] Preferably, in the invention, an (in vivo or in vitro) expression system, such as a bacterial expression system, is used that provides the polypeptides of the invention in a form that is suitable for pharmaceutical use, and such expression systems will again be clear to the skilled person. As also will be clear to the skilled person, polypeptides of the invention suitable for pharmaceutical use can be prepared using techniques for peptide synthesis.

[0698] For production on industrial scale, preferred heterologous hosts for the (industrial) production of Nanobodies or Nanobody-containing protein therapeutics include strains of E. coli, Pichia pastoris, S. cerevisiae that are suitable for large scale expression/production/fermentation, and in particular for large scale pharmaceutical (i.e. GMP grade) expression/production/fermentation. Suitable examples of such strains will be clear to the skilled person. Such strains and production/expression systems are also made available by companies such as Biovitrum (Uppsala, Sweden).

[0699] Alternatively, mammalian cell lines, in particular Chinese hamster ovary (CHO) cells, can be used for large scale expression/production/fermentation, and in particular for large scale pharmaceutical expression/production/fermentation. Again, such expression/production systems are also made available by some of the companies mentioned above.

[0700] The choice of the specific expression system would depend in part on the requirement for certain post-translational modifications, more specifically glycosylation. The production of a Nanobody-containing recombinant protein for which glycosylation is desired or required would necessitate the use of mammalian expression hosts that have the ability to glycosylate the expressed protein. In this respect, it will be clear to the skilled person that the glycosylation pattern obtained (i.e. the kind, number and position of residues attached) will depend on the cell or cell line that is used for the expression. Preferably, either a human cell or cell line is used (i.e. leading to a protein that essentially has a human glycosylation pattern) or another mammalian cell line is used that can provide a glycosylation pattern that is essentially and/or functionally the same as human glycosylation or at least mimics human glycosylation. Generally, prokaryotic hosts such as E. coli do not have the ability to glycosylate proteins, and the use of lower eukaryotes such as yeast usually leads to a glycosylation pattern that differs from human glycosylation. Nevertheless, it should be understood that all the foregoing host cells and expression systems can be used in the invention, depending on the desired amino acid sequence, Nanobody or polypeptide to be obtained.

[0701] Thus, according to one non-limiting aspect of the invention, the amino acid sequence, Nanobody or polypeptide of the invention is glycosylated. According to another non-limiting aspect of the invention, the amino acid sequence, Nanobody or polypeptide of the invention is non-glycosylated.

[0702] According to one preferred, but non-limiting aspect of the invention, the amino acid sequence, Nanobody or polypeptide of the invention is produced in a bacterial cell, in particular a bacterial cell suitable for large scale pharmaceutical production, such as cells of the strains mentioned above.

[0703] According to another preferred, but non-limiting aspect of the invention, the amino acid sequence, Nanobody or polypeptide of the invention is produced in a yeast cell, in particular a yeast cell suitable for large scale pharmaceutical production, such as cells of the species mentioned above.

[0704] According to yet another preferred, but non-limiting aspect of the invention, the amino acid sequence, Nanobody or polypeptide of the invention is produced in a mammalian cell, in particular in a human cell or in a cell of a human cell line, and more in particular in a human cell or in a cell of a human cell line that is suitable for large scale pharmaceutical production, such as the cell lines mentioned hereinabove.

[0705] As further described on pages 138 and 139 of WO 08/020,079, when expression in a host cell is used to produce the amino acid sequences, Nanobodies and the polypeptides of the invention, the amino acid sequences, Nanobodies and polypeptides of the invention can be produced either intracellullarly (e.g. in the cytosol, in the periplasma or in inclusion bodies) and then isolated from the host cells and optionally further purified; or can be produced extracellularly (e.g. in the medium in which the host cells are cultured) and then isolated from the culture medium and optionally further purified. Thus, according to one non-limiting aspect of the invention, the amino acid sequence, Nanobody or polypeptide of the invention is an amino acid sequence, Nanobody or polypeptide that has been produced intracellularly and that has been isolated from the host cell, and in particular from a bacterial cell or from an inclusion body in a bacterial cell. According to another non-limiting aspect of the invention, the amino acid sequence, Nanobody or polypeptide of the invention is an amino acid sequence, Nanobody or polypeptide that has been produced extracellularly, and that has been isolated from the medium in which the host cell is cultivated.

[0706] Some preferred, but non-limiting promoters for use with these host cells include those mentioned on pages 139 and 140 of WO 08/020,079.

[0707] Some preferred, but non-limiting secretory sequences for use with these host cells include those mentioned on page 140 of WO 08/020,079.

[0708] Suitable techniques for transforming a host or host cell of the invention will be clear to the skilled person and may depend on the intended host cell/host organism and the genetic construct to be used. Reference is again made to the handbooks and patent applications mentioned above.

[0709] After transformation, a step for detecting and selecting those host cells or host organisms that have been successfully transformed with the nucleotide sequence/genetic construct of the invention may be performed. This may for instance be a selection step based on a selectable marker present in the genetic construct of the invention or a step involving the detection of the amino acid sequence of the invention, e.g. using specific antibodies.

[0710] The transformed host cell (which may be in the form or a stable cell line) or host organisms (which may be in the form of a stable mutant line or strain) form further aspects of the present invention.

[0711] Preferably, these host cells or host organisms are such that they express, or are (at least) capable of expressing (e.g. under suitable conditions), an amino acid sequence, Nanobody or polypeptide of the invention (and in case of a host organism: in at least one cell, part, tissue or organ thereof). The invention also includes further generations, progeny and/or offspring of the host cell or host organism of the invention, that may for instance be obtained by cell division or by sexual or asexual reproduction.

[0712] To produce/obtain expression of the amino acid sequences of the invention, the transformed host cell or transformed host organism may generally be kept, maintained and/or cultured under conditions such that the (desired) amino acid sequence, Nanobody or polypeptide of the invention is expressed/produced. Suitable conditions will be clear to the skilled person and will usually depend upon the host cell/host organism used, as well as on the regulatory elements that control the expression of the (relevant) nucleotide sequence of the invention. Again, reference is made to the handbooks and patent applications mentioned above in the paragraphs on the genetic constructs of the invention.

[0713] Generally, suitable conditions may include the use of a suitable medium, the presence of a suitable source of food and/or suitable nutrients, the use of a suitable temperature, and optionally the presence of a suitable inducing factor or compound (e.g. when the nucleotide sequences of the invention are under the control of an inducible promoter); all of which may be selected by the skilled person. Again, under such conditions, the amino acid sequences of the invention may be expressed in a constitutive manner, in a transient manner, or only when suitably induced.

[0714] It will also be clear to the skilled person that the amino acid sequence, Nanobody or polypeptide of the invention may (first) be generated in an immature form (as mentioned above), which may then be subjected to post-translational modification, depending on the host cell/host organism used. Also, the amino acid sequence, Nanobody or polypeptide of the invention may be glycosylated, again depending on the host cell/host organism used.

[0715] The amino acid sequence, Nanobody or polypeptide of the invention may then be isolated from the host cell/host organism and/or from the medium in which said host cell or host organism was cultivated, using protein isolation and/or purification techniques known per se, such as (preparative) chromatography and/or electrophoresis techniques, differential precipitation techniques, affinity techniques (e.g. using a specific, cleavable amino acid sequence fused with the amino acid sequence, Nanobody or polypeptide of the invention) and/or preparative immunological techniques (i.e. using antibodies against the amino acid sequence to be isolated).

[0716] Generally, for pharmaceutical use, the polypeptides of the invention may be formulated as a pharmaceutical preparation or compositions comprising at least one polypeptide of the invention and at least one pharmaceutically acceptable carrier, diluent or excipient and/or adjuvant, and optionally one or more further pharmaceutically active polypeptides and/or compounds. By means of non-limiting examples, such a formulation may be in a form suitable for oral administration, for parenteral administration (such as by intravenous, intramuscular or subcutaneous injection or intravenous infusion), for topical administration, for administration by inhalation, by a skin patch, by an implant, by a suppository, etc. Such suitable administration forms—which may be solid, semi-solid or liquid, depending on the manner of administration—as well as methods and carriers for use in the preparation thereof, will be clear to the skilled person, and are further described herein.

[0717] Thus, in a further aspect, the invention relates to a pharmaceutical composition that contains at least one amino acid of the invention, at least one Nanobody of the invention or at least one polypeptide of the invention and at least one suitable carrier, diluent or excipient (i.e. suitable for pharmaceutical use), and optionally one or more further active substances.

[0718] Generally, the amino acid sequences, Nanobodies and polypeptides of the invention can be formulated and administered in any suitable manner known per se, for which reference is for example made to the general background art cited above (and in particular to WO 04/041862, WO 04/041863, WO 04/041865, WO 04/041867 and WO 08/020,079) as well as to the standard handbooks, such as Remington□s Pharmaceutical Sciences [symbol] , Mack Publishing Company, USA (1990), Remington, the Science and Practice of Pharmacy, 21st Edition, Lippincott Williams and Wilkins (2005); or the Handbook of Therapeutic Antibodies (S. Dubel, Ed.), Wiley, Weinheim, 2007 (see for example pages 252-255).

[0719] For example, the amino acid sequences, Nanobodies and polypeptides of the invention may be formulated and administered in any manner known per se for conventional antibodies and antibody fragments (including ScFv□s and diabodies) and other pharmaceutically active proteins. Such formulations and methods for preparing the same will be clear to the skilled person, and for example include preparations suitable for parenteral administration (for example intravenous, intraperitoneal, subcutaneous, intramuscular, intraluminal, intra-arterial or intrathecal administration) or for topical (i.e. transdermal or intradermal) administration.

[0720] Preparations for parenteral administration may for example be sterile solutions, suspensions, dispersions or emulsions that are suitable for infusion or injection. Suitable carriers or diluents for such preparations for example include, without limitation, those mentioned on page 143 of WO 08/020,079. Usually, aqueous solutions or suspensions will be preferred.

[0721] The amino acid sequences, Nanobodies and polypeptides of the invention can also be administered using gene therapy methods of delivery. See, e.g., U.S. Pat. No. 5,399,346, which is incorporated by reference in its entirety. Using a gene therapy method of delivery, primary cells transfected with the gene encoding an amino acid sequence, Nanobody or polypeptide of the invention can additionally be transfected with tissue specific promoters to target specific organs, tissue, grafts, tumors, or cells and can additionally be transfected with signal and stabilization sequences for subcellularly localized expression.

[0722] Thus, the amino acid sequences, Nanobodies and polypeptides of the invention may be systemically administered, e.g., orally, in combination with a pharmaceutically acceptable vehicle such as an inert diluent or an assimilable edible carrier. They may be enclosed in hard or soft shell gelatin capsules, may be compressed into tablets, or may be incorporated directly with the food of the patient□s diet. For oral therapeutic administration [symbol] acid sequences, Nanobodies and polypeptides of the invention may be combined with one or more excipients and used in the form of ingestible tablets, buccal tablets, troches, capsules, elixirs, suspensions, syrups, wafers, and the like. Such compositions and preparations should contain at least 0.1% of the amino acid sequence, Nanobody or polypeptide of the invention. Their percentage in the compositions and preparations may, of course, be varied and may conveniently be between about 2 to about 60% of the weight of a given unit dosage form. The amount of the amino acid sequence, Nanobody or polypeptide of the invention in such therapeutically useful compositions is such that an effective dosage level will be obtained.

[0723] The tablets, troches, pills, capsules, and the like may also contain binders, excipients, disintegrating agents, lubricants and sweetening or flavouring agents, for example those mentioned on pages 143-144 of WO 08/020,079. When the unit dosage form is a capsule, it may contain, in addition to materials of the above type, a liquid carrier, such as a vegetable oil or a polyethylene glycol. Various other materials may be present as coatings or to otherwise modify the physical form of the solid unit dosage form. For instance, tablets, pills, or capsules may be coated with gelatin, wax, shellac or sugar and the like. A syrup or elixir may contain the amino acid sequences, Nanobodies and polypeptides of the invention, sucrose or fructose as a sweetening agent, methyl and propylparabens as preservatives, a dye and flavoring such as cherry or orange flavor. Of course, any material used in preparing any unit dosage form should be pharmaceutically acceptable and substantially non-toxic in the amounts employed. In addition, the amino acid sequences, Nanobodies and polypeptides of the invention may be incorporated into sustained-release preparations and devices.

[0724] Preparations and formulations for oral administration may also be provided with an enteric coating that will allow the constructs of the invention to resist the gastric environment and pass into the intestines. More generally, preparations and formulations for oral administration may be suitably formulated for delivery into any desired part of the gastrointestinal tract. In addition, suitable suppositories may be used for delivery into the gastrointestinal tract.

[0725] The amino acid sequences, Nanobodies and polypeptides of the invention may also be administered intravenously or intraperitoneally by infusion or injection, as further described on pages 144 and 145 of WO 08/020,079.

[0726] For topical administration, the amino acid sequences, Nanobodies and polypeptides of the invention may be applied in pure form, i.e., when they are liquids. However, it will generally be desirable to administer them to the skin as compositions or formulations, in combination with a dermatologically acceptable carrier, which may be a solid or a liquid, as further described on page 145 of WO 08/020,079.

[0727] Generally, the concentration of the amino acid sequences, Nanobodies and polypeptides of the invention in a liquid composition, such as a lotion, will be from about 0.1-25 wt-%, preferably from about 0.5-10 wt-%. The concentration in a semi-solid or solid composition such as a gel or a powder will be about 0.1-5 wt-%, preferably about 0.5-2.5 wt-%.

[0728] The amount of the amino acid sequences, Nanobodies and polypeptides of the invention required for use in treatment will vary not only with the particular amino acid sequence, Nanobody or polypeptide selected but also with the route of administration, the nature of the condition being treated and the age and condition of the patient and will be ultimately at the discretion of the attendant physician or clinician. Also the dosage of the amino acid sequences, Nanobodies and polypeptides of the invention varies depending on the target cell, tumor, tissue, graft, or organ.

[0729] The desired dose may conveniently be presented in a single dose or as divided doses administered at appropriate intervals, for example, as two, three, four or more sub-doses per day. The sub-dose itself may be further divided, e.g., into a number of discrete loosely spaced administrations; such as multiple inhalations from an insufflator or by application of a plurality of drops into the eye.

[0730] An administration regimen could include long-term, daily treatment. By □ong-term□ is meant at least two weeks and preferably, several weeks, months, or years of duration. Necessary modifications in this dosage range may be determined by one of ordinary skill in the art using only routine experimentation given the teachings herein. See Remington□s Pharmaceutical Sciences (Martin, E. W., ed. 4), Mack Publishing Co., Easton, Pa. The dosage can also be adjusted by the individual physician in the event of any complication.

[0731] In another aspect, the invention relates to a method for the prevention and/or treatment of at least one autoimmune diseases, cancer metastasis and thrombotic vascular diseases, said method comprising administering, to a subject in need thereof, a pharmaceutically active amount of an amino acid sequence of the invention, of a Nanobody of the invention, of a polypeptide of the invention, and/or of a pharmaceutical composition comprising the same.

[0732] In the context of the present invention, the term □prevention and/or treatment□not only comprises preventing and/or treating the disease, but also generally comprises preventing the onset of the disease, slowing or reversing the progress of disease, preventing or slowing the onset of one or more symptoms associated with the disease, reducing and/or alleviating one or more symptoms associated with the disease, reducing the severity and/or the duration of the disease and/or of any symptoms associated therewith and/or preventing a further increase in the severity of the disease and/or of any symptoms associated therewith, preventing, reducing or reversing any physiological damage caused by the disease, and generally any pharmacological action that is beneficial to the patient being treated.

[0733] The subject to be treated may be any warm-blooded animal, but is in particular a mammal, and more in particular a human being. As will be clear to the skilled person, the subject to be treated will in particular be a person suffering from, or at risk of, the diseases and disorders mentioned herein.

[0734] The invention relates to a method for the prevention and/or treatment of at least one disease or disorder that is associated with Integrins, with its biological or pharmacological activity, and/or with the biological pathways or signalling in which Integrins is involved, said method comprising administering, to a subject in need thereof, a pharmaceutically active amount of an amino acid sequence of the invention, of a Nanobody of the invention, of a polypeptide of the invention, and/or of a pharmaceutical composition comprising the same. In particular, the invention relates to a method for the prevention and/or treatment of at least one disease or disorder that can be treated by modulating Integrins, its biological or pharmacological activity, and/or the biological pathways or signalling in which Integrins is involved, said method comprising administering, to a subject in need thereof, a pharmaceutically active amount of an amino acid sequence of the invention, of a Nanobody of the invention, of a polypeptide of the invention, and/or of a pharmaceutical composition comprising the same. In particular, said pharmaceutically effective amount may be an amount that is sufficient to modulate Integrins, its biological or pharmacological activity, and/or the biological pathways or signalling in which Integrins is involved; and/or an amount that provides a level of the amino acid sequence of the invention, of a Nanobody of the invention, of a polypeptide of the invention in the circulation that is sufficient to modulate Integrins, its biological or pharmacological activity, and/or the biological pathways or signalling in which Integrins is involved.

[0735] The invention furthermore relates to a method for the prevention and/or treatment of at least one disease or disorder that can be prevented and/or treated by administering an amino acid sequence of the invention, a Nanobody of the invention or a polypeptide of the invention to a patient, said method comprising administering, to a subject in need thereof, a pharmaceutically active amount of an amino acid sequence of the invention, of a Nanobody of the invention, of a polypeptide of the invention, and/or of a pharmaceutical composition comprising the same.

[0736] More in particular, the invention relates to a method for the prevention and/or treatment of at least one disease or disorder chosen from the group consisting of the diseases and disorders listed herein, said method comprising administering, to a subject in need thereof, a pharmaceutically active amount of an amino acid sequence of the invention, of a Nanobody of the invention, of a polypeptide of the invention, and/or of a pharmaceutical composition comprising the same.

[0737] In another aspect, the invention relates to a method for immunotherapy, and in particular for passive immunotherapy, which method comprises administering, to a subject suffering from or at risk of the diseases and disorders mentioned herein, a pharmaceutically active amount of an amino acid sequence of the invention, of a Nanobody of the invention, of a polypeptide of the invention, and/or of a pharmaceutical composition comprising the same.

[0738] In the above methods, the amino acid sequences, Nanobodies and/or polypeptides of the invention and/or the compositions comprising the same can be administered in any suitable manner, depending on the specific pharmaceutical formulation or composition to be used. Thus, the amino acid sequences, Nanobodies and/or polypeptides of the invention and/or the compositions comprising the same can for example be administered orally, intraperitoneally (e.g. intravenously, subcutaneously, intramuscularly, or via any other route of administration that circumvents the gastrointestinal tract), intranasally, transdermally, topically, by means of a suppository, by inhalation, again depending on the specific pharmaceutical formulation or composition to be used. The clinician will be able to select a suitable route of administration and a suitable pharmaceutical formulation or composition to be used in such administration, depending on the disease or disorder to be prevented or treated and other factors well known to the clinician.

[0739] The amino acid sequences, Nanobodies and/or polypeptides of the invention and/or the compositions comprising the same are administered according to a regime of treatment that is suitable for preventing and/or treating the disease or disorder to be prevented or treated. The clinician will generally be able to determine a suitable treatment regimen, depending on factors such as the disease or disorder to be prevented or treated, the severity of the disease to be treated and/or the severity of the symptoms thereof, the specific amino acid sequence, Nanobody or polypeptide of the invention to be used, the specific route of administration and pharmaceutical formulation or composition to be used, the age, gender, weight, diet, general condition of the patient, and similar factors well known to the clinician.

[0740] Generally, the treatment regimen will comprise the administration of one or more amino acid sequences, Nanobodies and/or polypeptides of the invention, or of one or more compositions comprising the same, in one or more pharmaceutically effective amounts or doses. The specific amount(s) or doses to administered can be determined by the clinician, again based on the factors cited above.

[0741] Generally, for the prevention and/or treatment of the diseases and disorders mentioned herein and depending on the specific disease or disorder to be treated, the potency of the specific amino acid sequence, Nanobody and polypeptide of the invention to be used, the specific route of administration and the specific pharmaceutical formulation or composition used, the amino acid sequences, Nanobodies and polypeptides of the invention will generally be administered in an amount between 1 gram and 0.01 microgram per kg body weight per day, preferably between 0.1 gram and 0.1 microgram per kg body weight per day, such as about 1, 10, 100 or 1000 microgram per kg body weight per day, either continuously (e.g. by infusion), as a single daily dose or as multiple divided doses during the day. The clinician will generally be able to determine a suitable daily dose, depending on the factors mentioned herein. It will also be clear that in specific cases, the clinician may choose to deviate from these amounts, for example on the basis of the factors cited above and his expert judgment. Generally, some guidance on the amounts to be administered can be obtained from the amounts usually administered for comparable conventional antibodies or antibody fragments against the same target administered via essentially the same route, taking into account however differences in affinity/avidity, efficacy, biodistribution, half-life and similar factors well known to the skilled person.

[0742] Usually, in the above method, a single amino acid sequence, Nanobody or polypeptide of the invention will be used. It is however within the scope of the invention to use two or more amino acid sequences, Nanobodies and/or polypeptides of the invention in combination.

[0743] The Nanobodies, amino acid sequences and polypeptides of the invention may also be used in combination with one or more further pharmaceutically active compounds or principles, i.e. as a combined treatment regimen, which may or may not lead to a synergistic effect. Again, the clinician will be able to select such further compounds or principles, as well as a suitable combined treatment regimen, based on the factors cited above and his expert judgement.

[0744] In particular, the amino acid sequences, Nanobodies and polypeptides of the invention may be used in combination with other pharmaceutically active compounds or principles that are or can be used for the prevention and/or treatment of the diseases and disorders cited herein, as a result of which a synergistic effect may or may not be obtained. Examples of such compounds and principles, as well as routes, methods and pharmaceutical formulations or compositions for administering them will be clear to the clinician.

[0745] When two or more substances or principles are to be used as part of a combined treatment regimen, they can be administered via the same route of administration or via different routes of administration, at essentially the same time or at different times (e.g. essentially simultaneously, consecutively, or according to an alternating regime). When the substances or principles are to be administered simultaneously via the same route of administration, they may be administered as different pharmaceutical formulations or compositions or part of a combined pharmaceutical formulation or composition, as will be clear to the skilled person.

[0746] Also, when two or more active substances or principles are to be used as part of a combined treatment regimen, each of the substances or principles may be administered in the same amount and according to the same regimen as used when the compound or principle is used on its own, and such combined use may or may not lead to a synergistic effect. However, when the combined use of the two or more active substances or principles leads to a synergistic effect, it may also be possible to reduce the amount of one, more or all of the substances or principles to be administered, while still achieving the desired therapeutic action. This may for example be useful for avoiding, limiting or reducing any unwanted side-effects that are associated with the use of one or more of the substances or principles when they are used in their usual amounts, while still obtaining the desired pharmaceutical or therapeutic effect.

[0747] The effectiveness of the treatment regimen used according to the invention may be determined and/or followed in any manner known per se for the disease or disorder involved, as will be clear to the clinician. The clinician will also be able, where appropriate and on a case-by-case basis, to change or modify a particular treatment regimen, so as to achieve the desired therapeutic effect, to avoid, limit or reduce unwanted side-effects, and/or to achieve an appropriate balance between achieving the desired therapeutic effect on the one hand and avoiding, limiting or reducing undesired side effects on the other hand.

[0748] Generally, the treatment regimen will be followed until the desired therapeutic effect is achieved and/or for as long as the desired therapeutic effect is to be maintained. Again, this can be determined by the clinician.

[0749] In another aspect, the invention relates to the use of an amino acid sequence, Nanobody or polypeptide of the invention in the preparation of a pharmaceutical composition for prevention and/or treatment of at least one autoimmune diseases, cancer metastasis and thrombotic vascular diseases; and/or for use in one or more of the methods of treatment mentioned herein.

[0750] The subject to be treated may be any warm-blooded animal, but is in particular a mammal, and more in particular a human being. As will be clear to the skilled person, the subject to be treated will in particular be a person suffering from, or at risk of, the diseases and disorders mentioned herein.

[0751] The invention also relates to the use of an amino acid sequence, Nanobody or polypeptide of the invention in the preparation of a pharmaceutical composition for the prevention and/or treatment of at least one disease or disorder that can be prevented and/or treated by administering an amino acid sequence, Nanobody or polypeptide of the invention to a patient.

[0752] More in particular, the invention relates to the use of an amino acid sequence, Nanobody or polypeptide of the invention in the preparation of a pharmaceutical composition for the prevention and/or treatment of autoimmune diseases, cancer metastasis and thrombotic vascular diseases, and in particular for the prevention and treatment of one or more of the diseases and disorders listed herein.

[0753] Again, in such a pharmaceutical composition, the one or more amino acid sequences, Nanobodies or polypeptides of the invention may also be suitably combined with one or more other active principles, such as those mentioned herein.

[0754] Finally, although the use of the Nanobodies of the invention (as defined herein) and of the polypeptides of the invention is much preferred, it will be clear that on the basis of the description herein, the skilled person will also be able to design and/or generate, in an analogous manner, other amino acid sequences and in particular (single) domain antibodies against Integrins, as well as polypeptides comprising such (single) domain antibodies.

[0755] For example, it will also be clear to the skilled person that it may be possible to □graft □ one or more of the CD□s mentioned above for the Nanobodies of the invention ont such (single) domain antibodies or other protein scaffolds, including but not limited to human scaffolds or non-immunoglobulin scaffolds. Suitable scaffolds and techniques for such CDR grafting will be clear to the skilled person and are well known in the art, see for example those mentioned in WO 08/020,079. For example, techniques known per se for grafting mouse or rat CDR□s onto human frameworks and scaffolds can be used in an analogous manner to provide chimeric proteins comprising one or more of the CDR□s of the Nanobodies of the invention and one or more human framework regions or sequences.

[0756] It should also be noted that, when the Nanobodies of the inventions contain one or more other CDR sequences than the preferred CDR sequences mentioned above, these CDR sequences can be obtained in any manner known per se, for example using one or more of the techniques described in WO 08/020,079.

[0757] Further uses of the amino acid sequences, Nanobodies, polypeptides, nucleic acids, genetic constructs and hosts and host cells of the invention will be clear to the skilled person based on the disclosure herein. For example, and without limitation, the amino acid sequences of the invention can be linked to a suitable carrier or solid support so as to provide a medium than can be used in a manner known per se to purify Integrins from compositions and preparations comprising the same. Derivatives of the amino acid sequences of the invention that comprise a suitable detectable label can also be used as markers to determine (qualitatively or quantitatively) the presence of Integrins in a composition or preparation or as a marker to selectively detect the presence of Integrins on the surface of a cell or tissue (for example, in combination with suitable cell sorting techniques).

[0758] The invention will now be further described by means of the following non-limiting experimental part and figures, in which the Figures show:

### FIGURES

[0759] FIG. 1: FIG. 1: Schemetic representation of the second round of selection on whole cells. Sub-libraries of VHH-phages enriched on membrane fractions isolated from HeLa cells grown under nomoxic (21% O₂) or hypoxic (1% O₂) conditions from the first round were incubated with live adherent HeLa cells in the corresponding conditions. Phages were preincubated with suspension cells, which were incubated under conditions opposite to the adherent cells (i.e first normoxic than hypoxic and vice versa). The counter selection was maintained during the time of selection. N denotes Normoxia, H denotes Hypoxia.

[0760] FIG. 2: Immunoprecipitation of the VHH targets from HeLa cell lysates. VHH-H6 was coupled to ProtA/G beads through the anti-Myc antibody (9E10), and used to pulldown cognate antigens from the lysate of HeLa cells. Bound proteins were analyzed with SDS-PAGE gels stained with SimplyBlue. The expected heavy and light chains of IgGs, BSA (smear) and VHH are indicated on the right. A protein band of approximately 150 kDa (denoted by *) represents the VHH-H6 target antigen. Lane M represents molecular weight marker proteins (in kDa), and are indicated on the left.

[0761] FIG. 3: Direct binding of VHH-H6 to recombinant α3β1 integrin. Recombinant VLA-3 (α3β1 integrin) or recombinant VLA-5 (a5β1 integrin) were coated into Maxisorb plates at 0.5 μg/well, and binding with VHH-H6 or no VHH (in which anti-Myc was used) was assayed in ELISA. Binding of the VHHs to the integrins is expressed as absorbance at 450 nm. Data represents the mean±standard deviation of three independent experiments

[0762] FIG. 4: DNA sequence of VHH H6, in which the sequences used to design primers for the amplification reaction are as follows: Italic—conserved sequences, in brackets are variations on these sequences to get VHH H6 family members; underlined, italic—sequence unique for CDR3 of VHH H6; and underlined—an additional sequence to improve the hybridisation. In the rest of the sequences there will be sequence variations and by sequencing the PCR products these variations will be determined.

[0763] FIG. 5: FACS experiments carried out on K562 and K562 cells expressing VLA-3. This figure clearly demonstrate that only the VLA-3 expressing cells are recognized by VHH H6.

[0764] FIG. 6: Inhibition of adhesion of K562 A3A cells by VHH H₆

[0765] FIG. 7: Biotinilated-Fibronectin binding to coated aVb6 (1.5 ug/ml) in presence of purified nanobodies: y=Percent biot-fibronectin bound; x=tested clones and controls, i.e. 1=141C1; 2=140A10; 3=140D10; 4=140G10; 5=140F2; 6=no nonobody; 7=140E5; 8=140H5; 9=140G8; 10=140D4; 11=140A5; 12=140B8; 13=222A4 (control)

[0766] FIG. 8: a) staining with about 0.03 uM CD49c; b) staining with 0.3 uM SEQ ID NO: 1486, i.e. VHH-5 bihead with 15GS linker; c) staining with SEQ ID NO: 1474, i.e. VHH-5 monohead

### EXPERIMENTAL PART

### Example 1

### Immunizations

[0767] Two llamas (169 and 170) were immunized according to standard protocols with 6 boosts of a cocktail of recombinant human proteins (2×40 ug+4×20 ug). Blood was collected from these animals at 6 and 10 days after the 6^{th} boost. The cocktail was a mixture of: Recombinant human alphaLbeta2/LFA-1 carrier free acquired from R&D Systems (cat nr: 3868-AV/CF); recombinant human alphaMbeta2/MAC-1 carrier free acquired from R&D Systems (cat nr: 4047-AM/CF); recombinant human alphavbeta6 carrier free acquired from R&D Systems (cat nr: 3817-AV/CF); recombinant human alpha3betaINLA-3 carrier free acquired from R&D Systems (cat nr: 2840-A3/CF); recombinant human alpha5beta1/VLA-5 carrier free acquired from R&D systems (cat nr: 3230-A5/CF).

### Example 2

### Library Construction

[0768] Peripheral blood mononuclear cells were prepared from blood samples using Ficoll-Hypaque according to the manufacturer□s instruction [symbol] tal RNA extracted was extracted from these cells as well as from the lymph node bow cells and used as starting material for RT-PCR to amplify Nanobody encoding gene fragments. These fragments were cloned into phagemid vector pAX50. Phage was prepared according to standard methods (see for example the prior art and applications filed by applicant cited herein) and stored at 4° C. for further use, making phage library 169 and 170.

### Example 3

### Selections

[0769] To identify Nanobodies recognizing the chemokines, phage libraries 169 and 170 were used for selections on the integrins that were used for immunization. The integrins were coated independently at 5 ug/ml, 0.5 ug/ml or 0 ug/ml (control) on Nunc Maxisorp ELISA plates (100 ul per wells). Selection was done as usual with the difference that 1 mM MnCl2 and 1 mM MgCl2 was added (or not) with the library during phage binding. Bound phages were eluted from the integrin using trypsine.

[0770] In addition to the trypsine elution, competitive elution were done. In this case, bound phages were eluted with either an excess of specific ligands (hICAM in the case of aLb2 and aMb2). Note that other elutions are possible: fibronectin (or RGD containing peptide that bind the ligand binding site of specific integrins) may be used in the case of aVb6 and a5b1; collagen in the case of a3b1) and with EDTA which chelates the bivalent ions bound to the integrin and essential to allow ligand binding.

[0771] An alternative to elute site-specific Nanobody is the use of specific antibody which are known to bind at relevant site on the integrin, this include for example the humanized monoclonal antibody Efalizumab that bind and block the aLb2 integrin.

[0772] Output of R1 selections were analyzed for enrichment factor (phage present in eluate relative to controls). Based on these parameters the best selections were chosen for further analysis. The polyclonal output was then recloned in PAX51 and individual TG1 colonies were picked and grown in 96 deep well plates (1 ml volume) and induced by adding IPTG for Nanobody expression. Periplasmic extracts (volume: ˜80 ul) were prepared according to standard methods (see for example the prior art and applications filed by applicant cited herein).

[0773] Alternatively, to enrich the pool of phage binding at relevant site on the integrin, a second round of selection using the phages (R2 output, see for example the prior art and applications filed by applicant cited herein) may be done in combination to trypsine or specific elution as mentioned above.

[0774] To enrich the pool of phage binding to a specific chain (alpha or beta), selection is also done in the presence of a counterselecting protein (during R1, R2 or both). For example to enrich for alpha5 binding phage, selection may be done in the presence of alpha3beta1 integrin.

### Example 4

### Screening for Binding

[0775] In order to determine binding specificity of the Nanobodies present in the periplasm fraction, the 10 ul of the periplasm fraction were tested in an ELISA binding assay. In short, 1.5 ug/ml of relevant integrin were coated directly on Maxisorp microtiter plates (Nunc). Free binding sites were blocked using 4% Marvel in PBS. Next, 10 ul of periplasmic extract containing nanobody of the different clones (92 per target) in 100 ul 1% Marvel PBST were allowed to bind to the immobilized antigen. After incubation and a washing step, nanobody binding was revealed using a mouse-anti-myc antibody, which was after a washing step detected with a Alkaline phosphatase (AP)-conjugated goat-anti-mouse antibody. Binding specificity was determined based on OD values compared to controls having received no nanobody. The result are shown in table B-1.

TABLE B-1
Positive clones (binding to the coated integrin) identify
by ELISA. Are depicted the number of positive as well
as the representative percentage of positive.

| | Number positive | Number positive | | |
|---|---|---|---|---|
| Integrin | clone in | clone in | positive | |
| coated | library169 | library170 | clone | Percent |
| (1.5 ug/ml) | (46 clones) | (46 clones) | (/92) | positive |
| aLb2 | 36 | 46 | 82 | 89 |
| aMb2 | 46 | 44 | 90 | 98 |
| aVb6 | 43 | 44 | 87 | 95 |
| a3b1 | 45 | 44 | 89 | 97 |

### Example 5

### Screening for Specificity

[0776] Because Integrins are noncovalently associated heterodimeric cell surface adhesion molecules composed of one alpha subunit and one beta subunit, the Nanobodies were tested for their specificity (alpha or beta chain). For this the periplasm from example 3 were tested on direct ELISA on 1) the integrin for which they were selected, 2) integrin sharing similar beta chain and 3) integrin with different alpha and beta chain according to the table B-2. Those results show also the specificity of the periplasm tested.

TABLE B-2

| | | | Coating 3 | | | |
|---|---|---|---|---|---|---|
| | Coating 1 | Coating 2 | (non- | | Alpha | Beta |
| | (selected | (similar beta | relevant | Integrin | chain | chain |
| | target) | chain) | integrin | specific | specific | specific |
| aLb2 | aLb2 | aMb2 | a5b1 | 82% | 18% | 63% |
| aMb2 | aMb2 | aLb2 | aVb6 | 76% | 13% | 63% |
| aVb6 | aVb6 | — | aLb2 | 75% | nt | nt |
| a3b1 | a3b1 | a5b1 | aVb6 | 48% | 16% | 31% |
| a5b1 | a5b1 | a3b1 | aMb2 | 28% | 1% | 27% |

[0777] Based on their binding selectivity, Nanobody clones were sequenced and grouped per family or unique non related sequence.

[0778] For alphaVbeta6, 23 unique sequences (out of 31 sequenced) were found grouping into: 2 families and 8 unique non-related sequences (see Table B-3).

TABLE B-3

| Name | Specificity | Other members of same family* |
|---|---|---|
| 140-F10 | alphaVbeta6 | 140-H10, 140-B10, 140-B8, 140-C8, |
| | | 140-D8 |
| 140-E5 | alphaVbeta6 | 140-F2, H5 |
| 140-E10 | alphaVbeta6 | No further member |
| 140-D10 | alphaVbeta6 | No further member |
| 140-G8 | alphaVbeta6 | No further member |
| 140-A10 | alphaVbeta6 | No further member |
| 140-A2 | alphaVbeta6 | No further member |
| 140-H8 | alphaVbeta6 | No further member |
| 140-G10 | alphaVbeta6 | No further member |
| 140-E2 | alphaVbeta6 | No further member |
| 140-D4 | alphaVbeta6 | No further member |
| 140-A5 | alphaVbeta6 | No further member |

*Nanobodies from the same family have similar sequences and identical or very similar (only having a few mutation) CDR3. E.g.:
nanobodies having identical CDR3 but having at least 1 mutation in the rest of the sequence (CDR1, CDR2 or in framworks)
nanobodies having few mutation in CDR3
nanobodies having both of the above.
For alphaLBeta2 and alphaMbeta2, 109 unique sequences were found (out of 181 sequenced) and are shown in Table B-4:
50 Beta2 specific (6 families and 6 non related sequences)
29 alphaL specific (8 families and 6 non related sequences)
14 alphaM specific (4 families and 5 non related unique sequence)
4 sequences unknown specificity non related to other families
4 sequences not yet tested (however Nanobodies raised against integrins)

TABLE B-4

| | | Other members of same family that have |
|---|---|---|
| Name | Specificity | same specificity * |
| 153-G1 | Beta2 | 138-C2, 139-C2, 253-E3, 152-C6, 153-G1 |
| 138- | | 152-D4, E4, 152-F2, 138-B2, 153-D4, 153- |
| A2, E5, F5, 139- | | G2, F4, 153-G5, 153-H2, 153-H4, 152-C4, |
| G2, 152-A6, 153- | | 152-F4, 152-E1, 152-H4, 152-F4, 152E1, |
| B5, B6, F5 | Beta2 | 152-H4, 235-C10, D10, 235-C3 |
| | | 153-D7, F7, E8, 152-A8, 236-A11, C5, F5, |
| | | 248-F8, 139-F10, 152-F11, H11, 153-G10, |
| | | 153-B7, E9, 152-H10, 152-B10, 139-D10, |
| | | 153-A10, 153-C7, 153-C9, 152- |
| | | A12, B9, H7, H8, 236-D11, A12, C11, 248- |
| 139-A10, 153- | | B8, E7, 152-G9, 153-F9, 248-G7, 236-B11, |
| D7, F7, E8 | Beta2 | 236-D5, 236-E12, 236-B5, F11, 152, G10 |
| 153-A8, B11 | Beta2 | 152-C9, 236-E5 |
| 138-H2 | Beta2 | 248-C2, 138-B5, 248-H1 |
| 138-A5, 139-E2, | | 152-G2 |
| 235-E6 | Beta2 | |
| 153-E10, D8, G7 | Beta2 | No further member |
| 235-D5, 153-A1 | Beta2 | No further member |
| 138-F2 | Beta2 | No further member |
| 139-H10 | Beta2 | No further member |
| 139-B2, 152-E2, | Beta2 | No further member |
| 235-C9, D9 | | |
| 248-C7 | Beta2 | No further member |
| 138-G2, 235-E10 | alphaL | 138-H5, 235-A6, 243-B9, 235-E9, 138-D2, |
| | | 138-E4 |
| 138-B10 | alphaL | 138-G11 |
| 138-D7 | alphaL | 138-H7, 152-B7, 138-D11, 138-C10 |
| 235-B7 | alphaL | 248-F2 |
| 248-F7, D8 | alphaL | 248-H7 |
| 248-D7 | alphaL | 236-B4, A5, 248-G8, 248-E8 |
| 248-C8 | alphaL | 236-E11 |
| 235-F3 | alphaL | 248-F1, G1, 248-G2 |
| 138-G4, G5 | alphaL | No further member |
| 235-A12, 248- | alphaL | No further member |
| B1, C1, E1, H2 | | |
| 248-B7 | alphaL | No further member |
| 248-A1 | alphaL | No further member |
| 248-D2, D1, E2 | alphaL | No further member |
| 248-A7 | alphaL | No further member |
| 139-B10 | alphaM | 139-B7, 139-C11, 139-C7, 139-H9 |
| 139-C10 | alphaM | 139-H11 |
| 139-D2 | alphaM | 243-G9 |
| 243-C9 | alphaM | 243-A9 |
| 139-E9 | alphaM | No further member |
| 139-H7 | alphaM | No further member |
| 139-H1 | alphaM | No further member |
| 243-H9 | alphaM | No further member |
| 153-D3 | alphaM | No further member |
| 248-A8 | Specificity not tested | No further member |
| | yet | |
| 248-H8 | Specificity not tested | No further member |
| | yet | |
| 248-A2 | Specificity not tested | No further member |
| | yet | |
| 248-B2 | Specificity not tested | No further member |
| | yet | |
| 152-D2 | Unknown specificity | No further member |
| 152-E9 | Unknown specificity | No further member |
| 152-E10 | Unknown specificity | No further member |
| 152-D7 | Unknown specificity | No further member |

* Nanobodies from the same family have similar sequences and identical or very similar (only having a few mutation) CDR3. E.g.:
nanobodies having identical CDR3 but having at least 1 mutation in the rest of the sequence (CDR1, CDR2 or in framworks)
nanobodies having few mutation in CDR3
nanobodies having both of the above.

For alpha3Beta1 and alpha5beta1, 60 unique sequences were found (out of 113 sequenced) and are shown in Table B-5:
24 specific for beta1 (2 families and 5 unique non related sequences)
7 specific for Alpha 5 (3 families)
19 specific for Alpha3 (4 families and 10 unique non related sequences)

TABLE B-5

| | | Other members of same family |
|---|---|---|
| Name | Specificity | that have same specificity * |
| 141-A10 | Beta1 | 141-C10, 142-C11, F7, |
| | | 141-E10, 141-F10, |
| | | 142-F10, 141-A11, 242-A12, |
| | | B12, B4, C4, D12, D4, |
| | | E4, F12, F4, G12, B8, |
| | | D8, 242-E8, 141-C11, |
| | | 242-G4, 142-C7, 142-B10, |
| | | 142-C9, 142-D8, A8, H9, |
| | | 142-E10, 142-E11, G11, |
| | | 141-D11, 141-F11, |
| | | 142-B11, 141-G11, 142-B7 |
| 142-A7 | Beta1 | 142-G7 |
| 141-H10 | Beta1 | No further member |
| 141-E5 | Beta1 | No further member |
| 141-F5 | Beta1 | No further member |
| 141-B6 | Beta1 | No further member |
| 245-D7 | Beta1 | No further member |
| 242-A4, | Alpha5 | No further member |
| A8, C12, C8, D7, | | |
| E12, F5, F8, G7, E11 | | |
| 241-A10, | Alpha5 | 241-D11, 241-C1, C2, |
| A11, B10, B11, | | 241-C10 |
| D10, D8, E10, E11, E4, | | |
| F11, F8, G10, G11, | | |
| H10, C11, C8 | | |
| 241-E1, F10 | Alpha5 | 241-E3 |
| 141-F1 | Alpha3 | 141-B4, 141-F6, G1 |
| 141-B11 | Alpha3 | 141-H11 |
| 141-A5 | Alpha3 | 141-E6 |
| 141-C2 | Alpha3 | 245-G1 |
| 141-D10 | Alpha3 | No further member |
| 141-A4 | Alpha3 | No further member |
| 141-D4, 245-H1 | Alpha3 | No further member |
| 141-B10 | Alpha3 | No further member |
| 245-E7 | Alpha3 | No further member |
| 245-B1 | Alpha3 | No further member |
| 245-D1 | Alpha3 | No further member |
| 245-A1, F1 | Alpha3 | No further member |
| 245-E1 | Alpha3 | No further member |
| 245-F7 | Alpha3 | No further member |

* Nanobodies from the same family have similar sequences and identical or very similar (only having a few mutation) CDR3. E.g.:
nanobodies having identical CDR3 but having at least 1 mutation in the rest of the sequence (CDR1, CDR2 or in framworks)
nanobodies having few mutation in CDR3
nanobodies having both of the above.

### Example 6

### Screening for Nanobody Neutralizing or Activating of aVb6

[0779] In order to determine neutralizing activity of the Nanobodies against aVb6, the clones were tested in a receptor/ligand binding assay (Competitive ELISA). Shortly, aVb6 was coated in 96 wells (Maxisorp, Nunc). After washing and blocking as usual, aVb6 was incubated with 15 ul periplasmic fraction prepared from example 3 in the presence of 1 mM MgCl2. Finally, biotinylated fibronectin was added. After washing, the presence of integrin bound biotinylated-fibronectin was detected using streptavidine-HRPO antibody. In the case where a Nanobody present in the periplasm neutralizes aVb6 (i.e., compete for ligand binding), no ligand bound was detected (low signal compared to control without any Nanobody). In the case where a Nanobody present in the periplasm activates aVb6 (i.e. favour ligand binding), more bound biotinylated fibronectin was detected (higher signal compared to control without any Nanobody). In all cases, the concentration of protein tested was used to get sub-optimal response. To confirm the function of the neutralizing Nanobody, the latest was further recloned in PAX51, produced in TG1 and purify using the TALON beads (see Table B-6, FIG. 7).

TABLE B-6

| | PERI | PURIFIED |
|---|---|---|
| | □Compete | □Compete |
| Nanobodies | FN binding | FN binding |
| 140-F10 | − | |
| 140-H10 | − | |
| 140-B10 | − | |
| 140-B8 | partial | − |
| 140-C8 | partial | |
| 140-D8 | partial | |
| 140-E5 | + | + |
| 140-F2, H5 | Partial, + | Partial, + |
| 140-E10 | − | |
| 140-D10 | + | + |
| 140-G8 | + | + |
| 140-A10 | + | + |
| 140-A2 | − | |
| 140-H8 | partial | |
| 140-G10 | + | + |
| 140-E2 | − | |
| 140-D4 | partial | partial |
| 140-A5 | partial | partial |

[0780] Table 4: The result of competition assay is indicated. (−) no competition, (+) competition. PERI or Purified is for competition assay using periplasm or purified Nanobodies respectively.

### Example 7

### Screening for Nanobody Neutralizing or Activating a5b1

[0781] In order to determine neutralizing activity of the Nanobodies against a5b1, the same may be done as in example 5, with the difference that a5b1 is coated instead of aVb6. Alternatively, the binding of alpha5beta1 binding to coated fibronectin may be detected with anti-beta1 antibody (R&D system, cat MAB 1778).

### Example 8

### Screening for Nanobody Neutralizing or Activating a3b1

[0782] In order to determine neutralizing activity of the Nanobodies against a3b1, the clones may be tested in a receptor/ligand binding assay (Competitive ELISA). Shortly, rat tail collagen or any specific a3b1 ligand is coated in 96 wells (Maxisorp, Nunc). After washing and blocking as usual, a3b1 is incubated with 15 ul periplasmic fraction prepared from above in the presence of 1 mM MgCl2. Finally, the fraction of a3b1 bound to the collagen is detected using subsequently biotinylated mouse-anti-human beta1 antibody (R&D system, cat MAB1778, biotinylated using Pierce kit according to supplier) and streptavidine-HRPO antibody.

### Example 9

### Screening for Nanobody Neutralizing or Activating aLb2 or aMb2

[0783] In order to determine neutralizing or activating activity of the Nanobodies against aLb2 and aMb2, the same may be done as in example 7 except that human-ICAM1-Fc is coated in 96 wells (Maxisorp, Nunc) instead of collagen and that the bound aLb2 and aMb2 is detected using biotinylated mouse-anti-human beta2 antibody (R&D Systems, cat MAB 1530, biotinylated using Pierce kit according to supplier).

### Example 10

### Screening for Nanobody Competing the Binding of Efaluzimab to aLb2

[0784] Efaluzimab is a commercial antibody blocking alphaL binding to its ligand and is use to treat psoriasis. In order to identify Nanobodies binding to the same site as Efaluzimab, a competition assay may be performed:

[0785] aLb2 is coated in 96 wells (Maxisorp, Nunc). After washing and blocking as usual, aLb2 is incubated with 15 ul periplasmic fraction prepared from above (example 1) in the presence of 1 mM MgCl2 (or 1 mM MnCl2) and Efaluzimab is added. After incubation and washing, the bound Efaluzimab is detected using mouse anti-human Fc-HRPO antibody (Jackson laboratories).

[0786] In order to obtain more Efaluzimab competing Nanobodies, new selection (as in example2) may be performed with the difference that an excess of Efaluzimab can be used (in R1, R2 or both) to elute specific phage binding at the same site as Efaluzimab.

### Example 11

### Screening for Nanobody Competing Blocking Integrin on Cells

[0787] Because cells rely on integrin to adhere to the substratum, the effect of Nanobodies (purified or as in periplasm fraction) on integrin can be tested directly on their effect on cell adherence on specific substratum. To improve specificity of the assay, a specific integrin can be overexpressed to increase the adhesion depending to this integrin. Increase or decrease in adhesion can be measure by measuring the number of adherent cell at a given time point. IN addition, the same assay can be done and migration can be measured. Alternatively, the binding of labelled ligand directly on cell is also a readout for integrin activity. This can also be achieve in the presence of Nanobodies.

### Example 12

### Selection and Screening of VHHs Recognizing Cell Surface Proteins

### Example 12.1

### Raising Llama Antibodies

[0788] Llamas were immunized with the antigens consisting of membrane vesicles of a cell line grown under hypoxia conditions or membrane fractions extracted from cells of a solid tumor in the presence of the adjuvant Stimune by subcutaneous injections. The immunization scheme consisted of a priming immunization (at day 0) followed by 3 boosts (at days 14, 28 and 35). The immune response was measured in the serum taken up at day 28 and compared to day 0. Alternatively, intact cells and tissues were used for immunization. The immunogens were injected subcutaneous in the absence of any adjuvant. The immunization scheme was as described for the membrane vesicles and membrane fractions immonogens.

### Example 12.2

### Construction of Variable Domains of Heavy Chain Llama Antibody Library

[0789] When the titer of the heavy chain antibodies increased at day 28, peripheral blood lymphocytes (PBLs) were isolated from 150 ml blood taken up at day 43. Total RNA was isolated from these PBLs using phenol-chloroform-isoamylalcohol method. RNA was converted into cDNA using superscriptIII (invitrogen). IgG binding domains were amplified with PCR using primers annealing at the signal sequence of the IgGs and the hinge region. The ˜700 bp fragment corresponding to the antigen binding domain of the heavy chain antibodies was excised from gel, and the SfiI restriction site was introduced at the 5□ by a nested PCR-step to facilitate cloning into the display vectors.

[0790] The purified 700 bp fragment was digested with BstEII (a restriction site found in the hinge region of heavy chain antibodies) and SfiI, and the resulting 400 bp antigen-binding fragment of the heavy chain antibodies were cloned in a phage-display plasmid.

[0791] The plasmids were transferred to Escherichia coli strain TG1. A transformation efficiency of 10 exp8, which also represents the diversity in the library, was generally obtained. E. coli TG 1 was used for the production of phages and for the infection by selected phages. Furthermore, E. coli TG1 was used for the production of selected VHH-monohcads and biheads.

### Example 12.3

### Selection of Variable Domains of Heavy Chain Llama Antibodies Recognizing Cell Surface Proteins

### Bacterium Strain and Cultivation Conditions

[0792] Escherichia coli strain TG1 was used for the maintenance of the plasmids, infection of the phages and expression of proteins. E. coli TG1 was grown in LB or 2×YT medium supplemented with glucose and antibiotics as indicated. VHH-phages were rescued by incubation of the phages with log-phase E. coli TG1 at 37° C. for 30 min (static conditions), followed by incubation in the presence of selection (ampicillin) overnight at 37° C. (shaking). Phages were produced from E. coli TG I containing phagemids with VHH genes fused to M13 gene3, by infection of log-phase bacteria with the helper phage VCSM13 (Stratagene, La Jolla, Calif., USA) for 30 min at 37° C. (static conditions), followed by incubation in the presence of both ampicillin and kanamycin overnight at 37° C. Produced phages were isolated by PEG precipitation of the culture supernatant.

### Cell Culture

[0793] HeLa cells were cultured in DMEM, supplemented with 10% Fetal Calf Serum (Gibco), 100 U/ml penicillin-streptomycin (Gibco) and 100 U/ml L-Glutamine (Gibco) at 5% CO₂, 21% O₂ for normoxia and 1% O₂ for hypoxia in a Invivo² Hypoxia Workstation 1000 (Biotrace International, UK) at 37° C.

Selection of VHH that Differentiate Between Cells Grown Under Hypoxic and Normoxic conditions

[0794] A selection procedure was designed to select VHHs against surface markers displayed differentially under hypoxic and normoxic conditions in two rounds. In the 1st round, membrane proteins isolated from HeLa cells grown under hypoxia or normoxia for 24 hrs using the vesicle isolation protocol were coated overnight at 4° C. in 96-wells Nunc Maxisorp plate (NUNC, Roskilde, Denmark). Different amounts of membrane proteins (10 μg, 5 μg, 1 μg and no protein at all) were coated in phosphate buffered saline (PBS) into each well. Coated wells were blocked with 4% Marvel (dried skimmed milk, Premier International Foods, Coolock, UK) in PBS for 1 hour at room temperature prior to the addition of phages. About 10¹¹ phages were added to each well. Phages were pre-incubated in 2% Marvel in PBS for 30 min in the presence of an excess of membrane proteins (15 μg/well) isolated from the condition opposite to the condition used in order to counter select for common antigens between the two conditions. Subsequently, phage/protein mixtures were added to the wells and incubated for 2 h at room temperature. The plate was then washed for 15 times with PBS containing 0.05% tween-20 (PBST) (the 5^{th}, 10^{th} and 15^{th} wash steps were done for 10 min) and 3 times with PBS. Bound phages were eluted from the wells with 100 mM triethylamine (TEA) and neutralized with 1M Tris-HCl pH 7.5. DNA information of the selected phages was rescued by infection of E. coli TG1 strain and subsequent selection for ampicillin

| Membrane | | | | |
|---|---|---|---|---|
| Proteins | 10 μg | 5 μg | 1 μg | PBS |
| Normoxia | 8 × 10⁴ | 1.4 × 10⁴ | 5.7 × 10³ | 1.3 × 10³ |
| Hypoxia | 1 × 10⁵ | 1 × 10⁵ | 6.4 × 10⁴ | 2 × 10² |

resistance.

[0795] The number of eluted phages was determined by plating serial dilutions of the different infections. Phages were produced from selections on the highest membrane protein concentrations from both hypoxia and normoxia, which both resulted in a high enrichment factor compared to empty wells.

[0796] Table B-5 Number of phages bound to the indicated conditions in the first round of selection.

[0797] Phagemid containing E. coli TG I were infected with the helper phage VCSM13 and phage particles were produced overnight in medium containing both ampicillin and kanamycin and no glucose. These phages were precipitated with PEG and used in the 2nd round selection. In the second round of selection, live HeLa cells were used as antigen. HeLa cells were cultured in a 6 wells format for 24 hrs under normoxia (21% O₂) or hypoxia (1% O₂) (FIG. 1). Wells contained before the start of the selection procedure 1.1×10⁶ cells grown 60-70% confluence. Prior to hypoxic selections all the buffers used were put overnight in a hypoxic environment. Cells for counter selection were trypsinized and spun down at 1200 rpm in cold DM EM—bicarbonate buffered +10% FCS. The cells were resuspended in cold binding buffer (DMEM-bicarbonate buffered +10% FCS and 25 mM Hepes) and pre-incubated with 10 μl phages/ml (˜10¹⁰ phages/ml) for 30 min. The phage-counter selection cell mixtures (2 ml) were added to adherent cells from the opposite conditions and incubated for 30 min on ice at the indicated conditions. The excess of cells in suspension compared to adherent cells was 5 to 6-fold for hypoxia and normoxia, respectively. Wells with no adherent cells were used as a control.

[0798] Unbound phages were washed for 15 times with cold PBS supplemented with 1 mM Ca²⁺ and 1 mM Mg²⁺. Surface bound phages were stripped with three consecutive washes (S1, S2 and S3) of 1 ml of cold glycine buffer (500 mM NaCl; 100 mM glycine pH 2.5) for 5 min on ice. S1, S2 and S3 were neutralized with 0.5 ml 1M Tris-HCl pH 7.4. In a final step remaining phages were eluted by scraping the adherent cells and incubation with 1 ml of cold 100 mM TEA for 4 min (E). E was also neutralized with 0.5 ml 1M Tris-HCl pH 7.4. Phages from the different fractions were rescued by infecting E. coil TG1. Monoclonal phages from successful selections were screened in a 96 well ELISA using HeLa cells that were grown for 24 hrs under normoxia (21% O₂) or hypoxia (1% O₂) and fixed with 3.7% formaldehyde in PBS. Bound phages were detected with an anti-M13 antibody coupled to the enzyme horseradish peroxidase (HRP) (Amersham Pharmacia Biotech, Uppsala, Sweden). This procedure resulted in a number of monoclonal phages. After recloning of the genes encoding VHHs from these monoclonal phages, restriction patterns were determined and from at least two members of each restriction pattern the nucleotide sequences have been determined. These VHHs were screened in a number of additional tests like immunofluorescence, immunoprecipitation and Western blotting, all techniques well known by persons skilled in the art.

[0799] This resulted in large number of unique VHHs. From one particular branch of the dendrogramme of all selected VHHs, we deducted an overall amino acid sequence of VHHs that have the desired property: QVQLV(Q)E(D)SGGGLVQAGGSLRLSCA(V,E)ASGRTFSSYAMGWFRQA(P)PGKERE F(L,W)VA(S)T(A)ISRSGSA(T)IYAD(Y)P(S)VKGRFTM(I,V)SDNAKNTVYLEMNSLKP EDTAVF(Y)YCAAARSGV(I) PSSRPTD(N)YDYWGQGTQVTVSS, whereas (X) means that at that postion also the indicated amino acid can be present. These variations can occur in combination with any of the other variations indicated.

[0800] One VHH, VHH H6 was further investigated. The a.a. sequences (SEQ ID NO: 1485) of VHH H6 is given below in Table B-6. In italics the CDRs are given.

[0801] Table B-6. Amino acid sequence of VHH obtained with the differential hypoxia/normoxia methods described in example 1. The CDRs, defined as described by Lutje Hulsik at all. ( ) are in bold. We compared the amino acid sequence of VHH H6 with the universal VHH framework as proposed by Saerens et al (2005), the differences between that sequence and the sequence of VHH H6 are underscored. Frame work amino acid dat differ from germline (V) genes are in italics. The large number of differences indicate an active maturation process to arrive to these amino acids:

VHH H6:
QVQLQDSGGGLVQAGGSLRLSCEASGRTFSSYAMGWFRQPPGKEREWVST
ISRSGSAIYAYPVKGRFTMSRDNAKNTVYLEMNSLKPEDTAVFYCAAARS
GVPSSRPTDYDYWGQGTQVTVSS

[0802] The sequence of VHH H6 is unique in a number of aspects. Uniqueness of the CDRs can be expected, but the large deviations of the frame work residues compared to the consensus sequence as defined by Saerens et al is very surprising. Such a high variation of the frame work indicates an active maturation of these amino acids.

[0803] The following changes in the H6-VHH may be of importance (based on analisys of sequence vs germline):
[0804] S30
[0805] A34
[0806] E 23
[0807] W 47
[0808] S49
[0809] T 50
[0810] M69
[0811] F93

### Example 13

### Reverse Proteomics to Determine the Nature of a Cell Surface Protein Recognized by a Particular VHH Selected According to the Method Described in Example 1 and Proof that Binds to α3β1-Integrin In Vitro and In Vivo.

### Example 13.1

[0812] Reverse proteomics was used to identify the antigen(s) of VHH-H6. VHH-H6 clearly immunoprecipitated a single 150 kDa band (FIG. 2). Mass spectrometry analysis assigned the highest scores to integrin 131 for this 150 kDa protein. The highly significant scores strongly suggest VHH-H6 specifically recognizes the α3β1 (VLA-3) integrin complex.

### Example 13.2

[0813] To confirm that α3β1 integrin was immunoprecipitated with VHH-H6, lysates from HeLa cells grown under hypoxia or normoxia were immunoprecipitated in the presence or absence of VHH-H6 and the precipitated proteins were analyzed by SDS-PAGE and Western blotting using conventional anti-α3 and anti-β1 integrin antibodies. VHH-H6 immunoprecipitated both α3 light chain and β1. Trace amounts of the integrin α3 light chain were detected independently of the VHH-H6 pulldown. However the amount of α3 light chain subunit increased markedly by VHH-H6 pulldown, suggesting that the α3 subunit was immunoprecipitated in complex with the β1 subunit, probably in the VLA-3 protein complex.

### Example 13.3

[0814] Since α3 and β1 proteins are heterodimers in complex with many different proteins, we analyzed the binding of VHH-H6 to purified recombinant VLA-3 in vitro by ELISA to confirm the direct interaction of VHH-H6 with VLA-3. VHH-H6 detected and (VLA-3) integrin but not α5β1 (VLA-5) integrin (Figure) suggesting that VHH-H6 binds directly to the α3β1 integrin. Furthermore, since VLA-5 also contained the β1 subunit, VHH-H6 interacts with the extracellular domain of α3, alone or in complex with β1. Additionally, VHH-B4 did not interact with either recombinant VLA-3 nor VLA-5. The results described in this example showed that VHH H6 recognizes specifically a3β1 integrin.

### Example 14

### Broadening of the number of VHHs Recognizing a Particular Cell Surface Protein Using Part of the Nucleotide Sequence Information of Cdr3

[0815] Although the number of selected phages after 2 or 3 rounds of selection was substantial, the affinity and specificity of the VHHs present on these phages was not always as good as necessary for the targets in mind. On the other hand the selected phages were only a fraction of the phages that recognize the antigen of interest. Therefore we have developed a new, versitile method to increase the number of VHHs that recognize the antigen of interest. To that end two sets of DNA primers were designed, one against the rather conserved N terminus of all VHHs and one against the C-terminus. The latter contains the rather conserved C-terminus (Frame work 4 often having the amino acid sequence WGQGTQ VTVSS) and 4-7 amino acids of CDR3, which of course are unique for the VHH recognizing the antigen of interest.

[0816] Using PCR technology it is simple to get amplification of just those DNA sequences that encode for VHHs recognizing the antigen of interest. Subsequently the nucleotide sequence of these amplified fragments has been determined and the affinity against α3β1 is determined with a Biocore, in which the antigen is immobilized. In this way variant sequences of a particular sequence could be obtained and a certain fraction of these new VHHs will have either better binding properties or even better properties to modulate certain biological processes.

### Example 15

### Selection of Cells Carrying a Particular Cell Surface Protein Indicative for Tumors

[0817] HeLa cells were exposed to normoxic or hypoxic conditions for 24 hrs. Cells were briefly trysinesed and spun down in cold culture medium at 1200 rpm for 5 min. Erythroleukemia K562 and K562A3 cells (a kind gift of Dr A. Sonnenberg) were cultured under normoxic conditions and spun down similar, medium was discarded. Cells were washed with 5 ml ice cold 0.2% BSA in PBS (BP) and divided over different tubes (approximately 500.000 cells per tube). Cells were incubated with VHH-B4 or VHH-H6 at a concentration of 300 μg/ml in BP, or BP alone, for 1 hr on ice. Cells were washed with 5 ml of BP, spun down and incubated with 20 ng/μl of FITC conjugated anti-HIS6 (C-term) (Invitrogen) for 30 min on ice. Next cells were washed again with 5 ml of BP, resuspended in 0.5 ml of BP and transferred into FACS tubes. Additional controls were performed with an anti-α3 integrin antibody (CD49c) (clone C3 II.1, BD Pharmingen, San Diego, Calif., USA), an anti-β1 integrin antibody (TS2/16, a kind gift of Dr. E. H. Danen), and anti GST (Santa Cruz). Antibodies were all used at 1/10 dilution, except for TS2/16 (1/2, supernatant of hybridoma), in combination with rat anti-mouse IgG1 PerCP (Becton Dickinson, San Diego, Calif., USA) diluted 1/50. FACS analysis was performed a flow cytometer (FACSCALIBUL, Becton Dickinson). The relative cell number was plotted against a Log fluorescence scale. To further substantiate the finding that VHH H6 specifically recognizes α3β1 (VLA-3) integrin in their natural context, we performed FACS analysis with K562 cells that lack a3 and compared those with the α3A transfectant line K562A3. Whereas the K562A3 transfectants expresses α3β1 and α5β1 on the surface, K562 cells only express a5β1. FACS analysis demonstrated that VHH-H6 only stained K562A3, indicating that VHH-H6 recognizes a3β1 (FIG. 5).

### Example 16

### Inhibition of Adhesion of K562 A3A Cell to RAC-1 by VHH H16

[0818] The linkage of the extracellular matrix to the cell requires transmembrane cell adhesion proteins that act as matrix receptors and tie the matrix to the cell cytoskeleton. Integrins are crucially important in that process. The variety of integrins heterodimers are formed from 9 types of □ubunits and 24 types of -subunits. Also posttranslational processing increase the diversity of integrin on surfaces. Because the same integrin molecule in different cell types can have different ligand-binding specificities, it seems that additional cell-type-specific factors can interact with integrins to modulate their binding activity. So the intrinsic diversity of integrins in the context of additional cell-type-specific factors make these molecules very suitable as diagnostic tool or for targeted delivery of drugs. To achieve that molecules that recognize specific integrins in there natural context are necessary. A subclass of such molecules may bind target integrins in such a way that intracellular signaling events are blocked.

[0819] To investigate whether VHH H6 alone or as homo bi-head or as hetero-bi-head can block the interaction of a cell with the extracellular matrix the following experiments were preformed. Rac11P coating: Let confluent cells secrete LN5 (laminin) rich matrix for 24 h 3×PBS wash o/n 20 mM EDTA at 4° C. 3×PBS wash 1 h, block 0.35% BSA in PBS at room temperature, was 2× with PBS.

[0820] Adhesion: Wash K562 once with DMEM 25 mM HEPES 0.35% BSA 175 ul 2*10e6 cells/ml K562+xul Ab+xul DMEM 25 mM HEPES 0.35% BSA (total 350 ul) 15 min Ab incubation at 37° C. in triplicate 100 ul/96 well 30 min adhesion at 37° C. 4×wash with DMEM 25 mM HEPES 0.35% BSA fix in 4% PFA 10 min at room temperature 2×H₂O wash stain with 5 mg/ml crystal violet in 2% EtOH 10 min at room temperature 4×H₂O wash 2% SDS 30 min at room temperature RT absorbtion at 655 nm.

### Example 17

### Construction of Homo- and Heterobiheads Recognizing One or Two Cell Surface Proteins Indicative for Solid Tumors

[0821] a. PCR was used to amplify the VHH sequences. Different primers sets are designed to amplify the VHH, which will be located at the N terminus and the VHH, which will be located at the C terminus of the bihead. The primers at the 3□ of [symbol] VHH and at the 5□ of [symbol] VHH, may encode a flexible sequence represented by a repeat of the dipeptide Gly-Ser. These same primers contain a unique restriction site (BamHI). After PCR amplification, the generated fragments are digested with a unique N-terminal restriction site (MfeI) and BamHI for the VHH that will be located at the N terminus, and with BamHI and a unique C-terminal restriction site (BstEII) for VHH that will be located at the C terminus. The fragments are ligated into an expression vector, which is digested with MfeI and BstEII. The VHH-bihead constructed in this way will be produced in E. coli after IPTG induction. The formed bihead will be secreted into the periplasm due to the presence of an OmpA-signal sequence.

[0822] The VHH-combination described above may consist of the same VHHs (homo-biheads) or of distinct VHHs (hetero-biheads). When the VHH sequence of interest contain an internal BamHI restriction site, this site should be removed beforehand. Alternatively, primers containing different restriction sites (BspEI) were designed.

[0823] b. Similar to the example described under a) a hetero-bihead of H6 can be constructed using the nucleotide sequences of H6 and another a3b1 single domain antibody (e.g. the ones described herein). To find the optimal bi-head both will be at the N terminus of the chimeric molecule, which means that H6 may be at the C-terminus resp. Also the nature and the length of the linker has to be optimized for various purposes.

### Example 18

### Fluorescence Microscopy with Biheads

[0824] Sample preparation: The human Erythroleukemia cell line K562 was cultivated in RPM1 medium supplemented with 10% FCS+pen+strep at 37° C. in 5% CO₂. K562 cells transfected with the integrin alpha3 (K562-A3) were grown under the same conditions, and the medium was supplemented with 1 mg/ml G418. The medium was exchanged one day before fixing the cells. The cells were fixed by adding equal volume of 4% paraformaldehyde in 0.1 M PHEM buffer (60 mM Pipes, 25 mM Hepes, 2 mM MgCl₂, 10 mM EGTA pH 6.9) to the culture medium, and incubation for 10 min at room temperature. Spin down the cells 5 min at 1200 rpm, and discard supernatant. Resuspend the cells in 20 ml (for a T75 flask) of the 4% paraformaldehyde solution (PFA), and incubate for 2 h at room temperature and overnight at 4° C. The PFA was removed by centrifugation of the cells 5 min at 1200 rpm. The cells were resuspended into 1 ml 0.1 M PHEM pH 6.9. The cells were washed 5-times with the same buffer. The cells were each time spun down for 1 min at 3000 rpm and resuspended into 1.5 ml 0.1 M PHEM pH 6.9. The cells were finally embedded into 12% gelatin in 0.1 M PHEM pH 6.9 by incubation at 37° C. for 5 min. The cells were pelleted in the gelatin solution by 5 min centrifugation at maximal speed. Resuspend the cells in a small volume of 12% gelatin (+/−30 ul). The gelatin was solidified by incubation for 15 min on ice. The cells were recuperated by cutting the tip of the tube and taking out the gelatin block containing the cells. The gelatin block was cut in smaller blocks, and incubated in 2.3 M sucrose in 0.1 M PHEM pH 6.9 overnight at 4° C. Next day, the blocks were put on small pins and frozen in liquid nitrogen.

[0825] Immunofluorescence: Make cryo-sections of about 350 to 450 nm thick with a glass knive at −80° C. or −100° C. Pick up the cryo-sections in 2.3 M sucrose in 0.1 M PHEM pH 6.9. Put the sections on silan-coated slide.

[0826] To get rid of the gelatin, wash the slides four times with PBS at 37° C. for 5 min each. Subsequently, wash the slides briefly with PBS at room temperature (5-times, 3 min). Incubate the slides with 1 mg/ml of Sodium Borohydride in PBS to quench the free aldehyde groups, followed by washing with PBS (5-times, 2 min), and 20 mM glycin in PBS (2-times, 3 min). The sections were blocked with 1% BSA in PBS (2-times, 5 min). The sections were incubated with the primary anti-integrin antibody (CD49c; Becton Dickinson), or with the anti-integrin nanobodies, for 1 h at room temperature, in 1% BSA in PBS. Different concentrations, ranging from 30 ug/ml up to 1 ug/ml, were used. Wash the sections with 0.1% BSA in PBS (5-times, 2 min).

[0827] The sections, which were then incubated with nanobodies (monoheads, biheads, or controls such as a commercial antibody CD49c (from BD Transduction Laboratories, Material number: 611045—see also results below) and were finally incubated with a bridging antibody (rabbit anti-llama heavy chain serum, diluted 1:100) for 1 h at room temperature, in 1% BSA in PBS, after which the sections were washed with 0.1% BSA in PBS (5-times, 2 min).

[0828] Finally the slides were incubated with the secondary fluorescent antibodies (Donkey anti-mouse coupled to Cy3, for sections incubated with CD49c, and Donkey anti-rabbit coupled to Cy3, for sections incubated with nanobodies and rabbit anti-llama heavy chain serum). The secondary antibodies were diluted (1:300) in 1% BSA in PBS, and incubated for 45 min at room temperature.

[0829] The sections were washed with PBS (5-times, 3 min), incubated with Dapi (1:1000 in PBS, from a stock of 2 mg/ml) for 5 min, and washed for the final time with PBS (5-times, 3 min) and with distilled water (5-times, 3 min).

[0830] The sections were embedded in Prolong Gold overnight at room temperature, and the coverslips were sealed the next moring with nailpolish.

[0831] The slides were analyzed with an Olympus AX70 fluorescence microscope.

### Sequence of the Biheads:

VHH-5 bihead (GS15):
SEQ ID NO: 1486
EVQLVESGGGLVQAGGSLRLSCAASGGTFRYQNMGWYRQAPGNEREWVASN
WATGATAYADSVKGRFTISRDDAKNVVYLQMNNLKPEDTAVYYCNRLSRPW
GWGQGTQVTVSSGGGGSGGGGSGGGGSEVQLVESGGGLVQAGGSLRLSCAA
SGGTFRYQNMGWYRQAPGNEREWVASNWATGATAYADSVKGRFTISRDDAK
NVVYLQMNNLKPEDTAVYYCNRLSRPWSWGQGTQVTVSS
VHH-5 bihead (GS5):
SEQ ID NO: 1487
EVQLVESGGGLVQAGGSLRLSCAASGGTFRYQNMGWYRQAPGNEREWVASN
WATGATAYADSVKGRFTISRDDAKNVVYLQMNNLKPEDTAVYYCNRLSRPW
GWGQGTQVTVSSGGGGSEVQLVESGGGLVQAGGSLRLSCAASGGTFRYQNM
GWYRQAPGNEREWVASNWATGATAYADSVKGRFTISRDDAKNVVYLQMNNL
KPEDTAVYYCNRLSRPWSWGQGTQVTVSS

### Results of Immunofluorescence:

[0833] The concentrations used were 10 ug/ml for bihead with SEQ ID NO: 1486, i.e. VHH-5 bihead with GS15 (−0.3 uM), and 5 ug/ml for CD49c (−0.03 uM) and 10 ug/ml for the monhead (SEQ ID NO: 1474). The staining here (see FIGS. 8a and 8b) is better with the bihead compared with CD49c (a 10-fold excess of biheads was used). Bihead was doing also good, when tested at a concentration of 1 ug/ml (the same molarity as for CD49c □data not shown). Quality of labeling by VHH increases by construction of a bihead (SEQ ID NO: 1486) vs monohead (SEQ ID NO: 1474) (FIG. 8b+c).

### Example 18

### Chemotaxis

[0834] Wells of 96-well tissue culture plates are coated with various concentrations of fibronectin in PBS overnight at 4° C., blocked with 2% heat-denatured BSA for 2 h at 37° C., and washed once with PBS. Asynchronously growing cells are trypsinized, collected in culture medium, washed once with PBS, resuspended in DME/0.5% BSA, and added to the wells at 2_{—}104 cells per well. After 20 min of incubation at 37° C., unattached cells are removed by rinsing of the plates with PBS, and the remaining attached cells are lysed and stained at 37° C. overnight in 3.75 mM p-nitrophenyl N-acetyl-_-D-glucosamide/0.05 M sodium citrate/0.25% Triton X-100. The OD405 is determined in triplicate wells and related to the OD405 measured in wells in which all 2_{—}104 cells are stained to calculate the percentage of adhered cells (E. Danen et al., 2002, J Cell Biol 159:1071-1086).

[0835] Alternatively, cells are plated sparsely (3×10⁴ cells) on 24-mm glass coverslips coated with fibronectin used at a concentration at which cells adhere with high efficiency. 3 h later, coverslips are incubated for 2 h with 10 mg/ml mitomycin-C (Sigma-Aldrich) to inhibit cell division, washed, and incubated overnight in culture medium with or without nanobodies covered with mineral oil at 37° C. and 5% CO₂. A 10×dry lens objective is used and phase-contrast images are taken every 15 min on a Widefield CCD system (Carl Zeiss Microlmaging, Inc.); tracks of individual cells are analyzed using Image) software (National Institutes of Health, Bethesda, Md.). The migration speed is calculated as [total path length (μm)/time (hour)] and the persistence of migration is calculated as [net displacement (μm)/total path length (μm)].

### References to Target Amino Acid Sequence:

| Integrin name referred herein | Protein and nucleotide sequence |
|---|---|
| Human alphaL | GenBank accession number: NM_002209 |
| Human beta2 | GenBank accession number: NM_000211 |
| Human alphaM | GenBank accession number: NM_000632 |
| Human alphaVbeta6 | GenBank accession number: NM_002210 |
| | and NM_000888 |
| Human beta1 | GenBank accession number: NM_002211 |
| Human alpha5 | GenBank accession number: NM_002205 |
| Human alpha3 | GenBank accession number: NM_005501 |

[0837] List of targets (and alternative names) within the class (excerpt):

Alpha subunits:

[0838] Alpha1/CD49a, alpha2/CD49b, alpha2b/CD41, alpha3/CD49c, alpha4/CD49d, alpha5/CD49e, alpha6/CD49f, alpha7, alpha8, alpha9, alpha10, alpha11, alphaE/CD103, alphaL/CD 11a, alphaM/CD11b, alphaX/CD11c, alphaV/CD51, alphaD/CD11d

### Beta Subunits:

[0839] Beta1/CD29, beta2/CD18, beta3/CD61, beta4/CD104, beta5, beta6, beta7, beta8

[0840] Example of known heterodimers with other names (not exclusive):

[0841] a1b1/VLA-1, a2b1/VLA-2/GPIa, a3b1/VLA-3, a-4b1/VLA-4, a5b1/VLA-5, a6b1/VLA-6/GPIc, αLβ2/LFA-1, αMβ2MAC-1, αXβ2/p150/95/CR4, α4β7/LPAM-1

Alpha Subunits with alphaI Domain:

[0842] alphaE/CD103, alphaL/CD11a, alphaM/CD11b, alphaX/CD11c, alphaV/CD51, alphaD/CD11d, alpha1/CD49a, alpha2/CD49b, alpha10

[0843] The terms and expressions which have been employed are used as terms of description and not of limitation, and there is no intention in the use of such terms and expressions of excluding any equivalents of the features shown and described or portions thereof, it being recognized that various modifications are possible within the scope of the invention.

[0844] All references disclosed herein are incorporated by reference, in particular for the teaching that is referenced hereinabove.

### Preferred Aspects:

[0845] 1. Amino acid sequence that is directed against and/or that can specifically bind to an integrin including human integrin, preferably to a subunit of integrin selected from the group consisting of alpha1, alpha2, alpha2b, alpha3, alpha4, alpha5, alpha6, alpha7, alpha8, alpha9, alpha10, alpha11, alphaE, alphaL, alphaM, alphaX, alphaV, alphaD, beta1, beta2, beta3, beta4, beta5, beta6, beta7, and beta8, more preferably to alpha3, alpha5, alphaL, alphaM, alphaV, beta1, beta2, beta6 and to any of the human forms of said integrins, e.g. for use as a therapeutic, preventative or diagnostic.
2. Amino acid sequence according to aspect 1, that is in essentially isolated form.
3. Amino acid sequence according to aspect 1 or 2, for administration to a subject, wherein said amino acid sequence does not naturally occur in said subject.
4. Amino acid sequence according to any of the preceding aspects, that can specifically bind to an integrin of aspect 1 with a dissociation constant (K_{D}) of 10⁻⁵ to 10⁻¹² moles/litre or less, and preferably 10⁻⁷ to 10⁻¹² moles/litre or less and more preferably 10⁻⁸ to 10⁻¹² moles/litre.
5. Amino acid sequence according to any of the preceding aspects, that can specifically bind to an integrin of aspect 1 with a rate of association (kₒₙ-rate) of between 10² M⁻¹s⁻¹ to about 10⁷ M⁻¹s⁻¹, preferably between 10³ M⁻¹s⁻¹ and 10⁷ M⁻¹s⁻¹, more preferably between 10⁴ M⁻¹s⁻¹ and 10⁷ M⁻¹s⁻¹, such as between 10⁵ M⁻¹s⁻¹ and 10⁷ M⁻¹s⁻¹.
6. Amino acid sequence according to any of the preceding aspects, that can specifically bind to an integrin of aspect 1 with a rate of dissociation (k_{off} rate) between 1s⁻¹ and 10⁻⁶ s⁻¹, preferably between 10⁻² s⁻¹ and 10⁻⁶ s⁻¹, more preferably between 10⁻³ s¹ and 10⁻⁶ s⁻¹, such as between 10⁻⁴ s⁻¹ and 10⁻⁶ s⁻¹.
7. Amino acid sequence according to any of the preceding aspects, that can specifically bind to an integrin of aspect 1 with an affinity less than 500 nM, preferably less than 200 nM, more preferably less than 10 nM, such as less than 500 pM.
8. Amino acid sequence according to any of the preceding aspects, that is a naturally occurring amino acid sequence (from any suitable species) or a synthetic or semi-synthetic amino acid sequence.
9. Amino acid sequence according to any of the preceding aspects, that comprises an immunoglobulin fold or that under suitable conditions is capable of forming an immunoglobulin fold.
10. Amino acid sequence according to any of the preceding aspects, that essentially consists of 4 framework regions (FR1 to FR4 respectively) and 3 complementarity determining regions (CDR1 to CDR3 respectively).
11. Amino acid sequence according to any of the preceding aspects, that is an immunoglobulin sequence.
12. Amino acid sequence according to any of the preceding aspects, that is a naturally occurring immunoglobulin sequence (from any suitable species) or a synthetic or semi-synthetic immunoglobulin sequence.
13. Amino acid sequence according to any of the preceding aspects that is a humanized immunoglobulin sequence, a camelized immunoglobulin sequence or an immunoglobulin sequence that has been obtained by techniques such as affinity maturation.
14. Amino acid sequence according to any of the preceding aspects, that essentially consists of a light chain variable domain sequence (e.g. a V_{L}-sequence); or of a heavy chain variable domain sequence (e.g. a V_{H}-sequence).
15. Amino acid sequence according to any of the preceding aspects, that essentially consists of a heavy chain variable domain sequence that is derived from a conventional four-chain antibody or that essentially consist of a heavy chain variable domain sequence that is derived from heavy chain antibody.
16. Amino acid sequence according to any of the preceding aspects, that essentially consists of a domain antibody (or an amino acid sequence that is suitable for use as a domain antibody), of a single domain antibody (or an amino acid sequence that is suitable for use as a single domain antibody), of a “dAb” (or an amino acid sequence that is suitable for use as a dAb) or of a Nanobody (including but not limited to a V_{HH} sequence).
17. Amino acid sequence according to any of the preceding aspects, that essentially consists of a Nanobody.
18. Amino acid sequence according to any of the preceding aspects, that essentially consists of a Nanobody that
[0846] i) has 80% amino acid identity with at least one of the amino acid sequences of SEQ ID NO□s: 1 to 22, in which for the purposes of determining the degree of amino acid identity, the amino acid residues that form the CDR sequences are disregarded;
   and in which:
[0847] ii) preferably one or more of the amino acid residues at positions 11, 37, 44, 45, 47, 83, 84, 103, 104 and 108 according to the Kabat numbering are chosen from the Hallmark residues mentioned in Table B-2.
   19. Amino acid sequence according to any of the preceding aspects, that essentially consists of a Nanobody that
[0848] i. has 80% amino acid identity with at least one of the amino acid sequences of SEQ ID NO□s 1316 to 1487, in which for the purposes of determining the degree of amino acid identity, the amino acid residues that form the CDR sequences are disregarded; and in which:
[0849] ii. preferably one or more of the amino acid residues at positions 11, 37, 44, 45, 47, 83, 84, 103, 104 and 108 according to the Kabat numbering are chosen from the Hallmark residues mentioned in Table B-2.
   20. Amino acid sequence according to any of the preceding aspects, that essentially consists of a humanized Nanobody.
   21. Amino acid sequence according to any of the preceding aspects, that in addition to the at least one binding site for binding against integrin or a subunit of an integrin according to aspect 1, contains one or more further binding sites for binding against other antigens, proteins or targets.
   22. Amino acid sequence directed against an integrin including human integrin, preferably to a subunit of integrin selected from the group consisting of alpha1, alpha2, alpha2b, alpha3, alpha4, alpha5, alpha6, alpha7, alpha8, alpha9, alpha10, alpha11, alphaE, alphaL, alphaM, alphaX, alphaV, alphaD, beta1, beta2, beta3, beta4, beta5, beta6, beta7, and beta8, more preferably to alpha3, alpha5, alphaL, alphaM, alphaV, beta1, beta2, beta6 and to any of the human forms of said integrins, e.g. for use as a therapeutic, preventative or diagnostic (e.g. for correlative imaging), that comprises one or more stretches of amino acid residues chosen from the group consisting of:
[0850] j) the amino acid sequences of SEQ ID NO□s 296 to 465;
[0851] k) amino acid sequences that have at least 80% amino acid identity with at least one of the amino acid sequences of SEQ ID NO□ 296s to 465;
[0852] l) amino acid sequences that have 3, 2, or 1 amino acid difference with at least one of the amino acid sequences of SEQ ID NO□ 296s to 465;
[0853] m) the amino acid sequences of SEQ ID NO□636s to 805;
[0854] n) amino acid sequences that have at least 80% amino acid identity with at least one of the amino acid sequences of SEQ ID NO□ 636s to 805;
[0855] o) amino acid sequences that have 3, 2, or 1 amino acid difference with at least one of the amino acid sequences of SEQ ID NO□ 636s to 805;
[0856] p) the amino acid sequences of SEQ ID NO□ 976s to 1145;
[0857] q) amino acid sequences that have at least 80% amino acid identity with at least one of the amino acid sequences of SEQ ID NO□ 976s to 1145;
[0858] r) amino acid sequences that have 3, 2, or 1 amino acid difference with at least one of the amino acid sequences of SEQ ID NOD: 976 to 1145;
   or any suitable combination thereof.
   23. Amino acid sequence according to aspect 22, in which at least one of said stretches of amino acid residues forms part of the antigen binding site for binding against an integrin.
   24. Amino acid sequence according to aspect 22, that comprises two or more stretches of amino acid residues chosen from the group consisting of:
[0859] j) the amino acid sequences of SEQ ID NO□ 296s to 465;
[0860] k) amino acid sequences that have at least 80% amino acid identity with at least one of the amino acid sequences of SEQ ID NO□ 296s to 465;
[0861] l) amino acid sequences that have 3, 2, or 1 amino acid difference with at least one of the amino acid sequences of SEQ ID NO□ 296s to 465;
[0862] m) the amino acid sequences of SEQ ID NO□ 636s to 805;
[0863] n) amino acid sequences that have at least 80% amino acid identity with at least one of the amino acid sequences of SEQ ID NO□ 636s to 805;
[0864] o) amino acid sequences that have 3, 2, or 1 amino acid difference with at least one of the amino acid sequences of SEQ ID NO□ 636s to 805;
[0865] p) the amino acid sequences of SEQ ID NO□ 976s to 1145;
[0866] q) amino acid sequences that have at least 80% amino acid identity with at least one of the amino acid sequences of SEQ ID NO□ 976s to 1145;
[0867] r) amino acid sequences that have 3, 2, or 1 amino acid difference with at least one of the amino acid sequences of SEQ ID NO□ 976s to 1145;
   such that (i) when the first stretch of amino acid residues corresponds to one of the amino acid sequences according to a), b) or c), the second stretch of amino acid residues corresponds to one of the amino acid sequences according to d), e), f), g), h) or i); (ii) when the first stretch of amino acid residues corresponds to one of the amino acid sequences according to d), e) or f), the second stretch of amino acid residues corresponds to one of the amino acid sequences according to a), b), c), g), h) or i); or (iii) when the first stretch of amino acid residues corresponds to one of the amino acid sequences according to g), h) or i), the second stretch of amino acid residues corresponds to one of the amino acid sequences according to a), b), c), d), e) or f).
   25. Amino acid sequence according to aspect 24, in which the at least two stretches of amino acid residues forms part of the antigen binding site for binding against an integrin.
   26. Amino acid sequence according to any of aspects 24, that comprises three or more stretches of amino acid residues, in which the first stretch of amino acid residues is chosen from the group consisting of:
[0868] a) the amino acid sequences of SEQ ID NO□ 296s to 465;
[0869] b) amino acid sequences that have at least 80% amino acid identity with at least one of the amino acid sequences of SEQ ID NO□ 296s to 465;
[0870] c) amino acid sequences that have 3, 2, or 1 amino acid difference with at least one of the amino acid sequences of SEQ ID NO□ 296s to 465;
   the second stretch of amino acid residues is chosen from the group consisting of:
[0871] d) the amino acid sequences of SEQ ID NO□ 636s to 805;
[0872] e) amino acid sequences that have at least 80% amino acid identity with at least one of the amino acid sequences of SEQ ID NO□ 636s to 805;
[0873] f) amino acid sequences that have 3, 2, or 1 amino acid difference with at least one of the amino acid sequences of SEQ ID NO□ 636s to 805;
   and the third stretch of amino acid residues is chosen from the group consisting of:
[0874] g) the amino acid sequences of SEQ ID NO□ 976s to 1145;
[0875] h) amino acid sequences that have at least 80% amino acid identity with at least one of the amino acid sequences of SEQ ID NO□ 976s to 1145;
[0876] i) amino acid sequences that have 3, 2, or 1 amino acid difference with at least one of the amino acid sequences of SEQ ID NO□ 976s to 1145.
   27. Amino acid sequence according to aspect 24, in which the at least three stretches of amino acid residues forms part of the antigen binding site for binding against integrin.
   28. Amino acid sequence according to any of previous aspects, in which the CDR sequences of said amino acid sequence have at least 70% amino acid identity, preferably at least 80% amino acid identity, more preferably at least 90% amino acid identity, such as 95% amino acid identity or more or even essentially 100% amino acid identity with the CDR sequences of at least one of the amino acid sequences of SEQ ID NO□ 131s6 to 1487.
   29. Amino acid sequence directed against an integrin that cross-blocks the binding of at least one of the amino acid sequences according to any of aspects 22 to 28.
   30. Amino acid sequence directed against an integrin that is cross-blocked from binding to an integrin by at least one of the amino acid sequences according to any of aspects 22 to 29.
   31. Amino acid sequence according to any of aspects 29 or 30, wherein the ability of said amino acid sequence to cross-block or to be cross-blocked is detected in a Biacore assay.
[0877] 32. Amino acid sequence according to any of aspects 29 to 31, wherein the ability of said amino acid sequence to cross-block or to be cross-blocked is detected in an ELISA assay.
[0878] 33. Amino acid sequence according to any of aspects 29 to 31, that can specifically bind to an integrin with a dissociation constant (K_{D}) of 10⁻⁵ to 10⁻¹² moles/litre or less, and preferably 10⁻⁷ to 10⁻¹² moles/litre or less and more preferably 10⁻⁸ to 10⁻¹² moles/litre.
[0879] 34. Amino acid sequence according to any of aspects 29 to 31, that can specifically bind to an integrin with a rate of association (kₒₙ-rate) of between 10² M⁻¹s⁻¹ to about 10⁷ M⁻¹s⁻¹, preferably between 10³ M⁻¹s⁻¹ and 10⁷ M⁻¹s⁻¹, more preferably between 10⁴ M⁻¹s⁻¹ and 10⁷ M⁻¹s⁻¹, such as between 10⁵ M⁻¹s⁻¹ and 10⁷ M⁻¹s⁻¹.
   35. Amino acid sequence according to any of aspects 29 to 31, that can specifically bind to an integrin with a rate of dissociation (k_{off}-rate) between 1 s⁻¹ and 10⁻⁶ s⁻¹ preferably between 10⁻² s⁻¹ and 10⁻⁶ s⁻¹, more preferably between 10⁻³ s⁻¹ and 10−6 s⁻¹, such as between 10⁻⁴ s⁻¹ and 10⁻⁶ s⁻¹.
   36. Amino acid sequence according to any of aspects 29 to 31, that can specifically bind to an integrin with an affinity less than 500 nM, preferably less than 200 nM, more preferably less than 10 nM, such as less than 500 pM.
   37. Amino acid sequence according to any of aspects 29 to 31, that essentially consists of a heavy chain variable domain sequence that is derived from a conventional four-chain antibody or that essentially consist of a heavy chain variable domain sequence that is derived from heavy chain antibody.
   38. Amino acid sequence according to any of aspects 29 to 31, that essentially consists of a domain antibody (or an amino acid sequence that is suitable for use as a domain antibody), of a single domain antibody (or an amino acid sequence that is suitable for use as a single domain antibody), of a “dAb” (or an amino acid sequence that is suitable for use as a dAb) or of a Nanobody (including but not limited to a V_{HH} sequence).
   39. Amino acid sequence according to any of aspects 22 to 38, that essentially consists of a Nanobody that
[0880] i) has 80% amino acid identity with at least one of the amino acid sequences of SEQ ID NOD s: 1 to 22, in which for the purposes of determining the degree of amino acid identity, the amino acid residues that form the CDR sequences are disregarded;
   and in which:
[0881] ii) preferably one or more of the amino acid residues at positions 11, 37, 44, 45, 47, 83, 84, 103, 104 and 108 according to the Kabat numbering are chosen from the Hallmark residues mentioned in Table B-2.
   40. Amino acid sequence according to any of aspects 22 to 39, that essentially consists of a Nanobody that
[0882] i) has 80% amino acid identity with at least one of the amino acid sequences of SEQ ID-NO□ 131s6 to 1487, in which for the purposes of determining the degree of amino acid identity, the amino acid residues that form the CDR sequences are disregarded;
   and in which:
[0883] ii) preferably one or more of the amino acid residues at positions 11, 37, 44, 45, 47, 83, 84, 103, 104 and 108 according to the Kabat numbering are chosen from the Hallmark residues mentioned in Table B-2.
   41. Amino acid sequence according to any of aspects 22 to 40, that essentially consists of a humanized Nanobody.
   42. Amino acid sequence according to any of the preceding aspects, that in addition to the at least one binding site for binding formed by the CDR sequences, contains one or more further binding sites for binding against other antigens, proteins or targets.
   43. Amino acid sequence that essentially consists of 4 framework regions (FR I to FR4, respectively) and 3 complementarity determining regions (CDR1 to CDR3, respectively), in which:
   [0884] CDR1 is chosen from the group consisting of:
[0885] j) the amino acid sequences of SEQ ID NO□296s to 465;
[0886] k) amino acid sequences that have at least 80% amino acid identity with at least one of the amino acid sequences of SEQ ID NO□ 296s to 465;
[0887] l) amino acid sequences that have 3, 2, or 1 amino acid difference with at least one of the amino acid sequences of SEQ ID NO□ 296s to 465;
   and/or
   [0888] CDR2 is chosen from the group consisting of:
[0889] m) the amino acid sequences of SEQ ID NO□ 636s to 805;
[0890] n) amino acid sequences that have at least 80% amino acid identity with at least one of the amino acid sequences of SEQ ID NO□ 636s to 805;
[0891] o) amino acid sequences that have 3, 2, or 1 amino acid difference with at least one of the amino acid sequences of SEQ ID NO□ 636s to 805;
   and/or
   [0892] CDR3 is chosen from the group consisting of:
[0893] p) the amino acid sequences of SEQ ID NO□ 976s to 1145;
[0894] q) amino acid sequences that have at least 80% amino acid identity with at least one of the amino acid sequences of SEQ ID NO□ 976s to 1145;
[0895] r) amino acid sequences that have 3, 2, or 1 amino acid difference with at least one of the amino acid sequences of SEQ ID NO□ 976s to 1145.
   44. Amino acid sequence that essentially consists of 4 framework regions (FR1 to FR4, respectively) and 3 complementarity determining regions (CDR1 to CDR3, respectively), in which:
   [0896] CDR1 is chosen from the group consisting of:
[0897] j) the amino acid sequences of SEQ ID NO□ 296s to 465;
[0898] k) amino acid sequences that have at least 80% amino acid identity with at least one of the amino acid sequences of SEQ ID NO□ 296s to 465;
[0899] l) amino acid sequences that have 3, 2, or 1 amino acid difference with at least one of the amino acid sequences of SEQ ID NO□ 296s to 465;
   and
   [0900] CDR2 is chosen from the group consisting of:
[0901] m) the amino acid sequences of SEQ ID NO□ 636s to 805;
[0902] n) amino acid sequences that have at least 80% amino acid identity with at least one of the amino acid sequences of SEQ ID NO□ 636s to 805;
[0903] o) amino acid sequences that have 3, 2, or 1 amino acid difference with at least one of the amino acid sequences of SEQ ID NO□ 636s to 805;
   and
   [0904] CDR3 is chosen from the group consisting of:
[0905] p) the amino acid sequences of SEQ ID NO□ 976s to 1145;
[0906] q) amino acid sequences that have at least 80% amino acid identity with at least one of the amino acid sequences of SEQ ID NO□ 976s to 1145;
[0907] r) amino acid sequences that have 3, 2, or 1 amino acid difference with at least one of the amino acid sequences of SEQ ID NO□s: 91646 [symbol] .
   45. Amino acid sequence according to any of aspects 43 to 44, in which the CDR sequences of said amino acid sequence have at least 70% amino acid identity, preferably at least 80% amino acid identity, more preferably at least 90% amino acid identity, such as 95% amino acid identity or more or even essentially 100% amino acid identity with the CDR sequences of at least one of the amino acid sequences of SEQ ID NO□s: 1316 to 1487.
   46. Amino acid sequence directed against an integrin that cross-blocks the binding of at least one of the amino acid sequences according to any of aspects 43 to 45.
   47. Amino acid sequence directed against an integrin that is cross-blocked from binding to an integrin by at least one of the amino acid sequences according to any of aspects 43 to 46.
   48. Amino acid sequence according to any of aspects 43 to 47 wherein the ability of said amino acid sequence to cross-block or to be cross-blocked is detected in a Biacore assay.
   49. Amino acid sequence according to any of aspects 43 to 48 wherein the ability of said amino acid sequence to cross-block or to be cross-blocked is detected in an ELISA assay.
   50. Amino acid sequence according to any of aspects 43 to 49, that is in essentially isolated form.
   51. Amino acid sequence according to any of aspects 43 to 50, for administration to a subject, wherein said amino acid sequence does not naturally occur in said subject.
   52. Amino acid sequence according to any of aspects 43 to 51, that can specifically bind to an integrin with a dissociation constant (K_{D}) of 10⁻⁵ to 10⁻¹² moles/litre or less, and preferably 10⁻⁷ to 10⁻¹² moles/litre or less and more preferably 10⁻⁸ to 10⁻¹² moles/litre.
   53. Amino acid sequence according to any of aspects 43 to 51, that can specifically bind to an integrin with a rate of association (kₒₙ-rate) of between 10² M⁻¹s⁻¹ to about 10⁷ M⁻¹s⁻¹, preferably between 10³ M⁻¹s⁻¹ and 10⁷ M⁻¹s⁻¹, more preferably between 10⁴ M⁻¹s⁻¹ and 10⁷ M⁻¹s⁻¹, such as between 10⁵ M⁻¹s⁻¹ and 10⁷ M⁻¹s⁻¹.
   54. Amino acid sequence according to any of aspects 43 to 51, that can specifically bind to an integrin with a rate of dissociation (k_{off} rate) between 1s⁻¹ and 10⁻⁶ s⁻¹ preferably between 10⁻² s⁻¹ and 10⁻⁶ s⁻¹, more preferably between 10⁻³ s⁻¹ and 10⁻⁶ s⁻¹, such as between 10⁻⁴ s⁻¹ and 10⁻⁶ s⁻¹.
   55. Amino acid sequence according to any of aspects 43 to 51, that can specifically bind to an integrin with an affinity less than 500 nM, preferably less than 200 nM, more preferably less than 10 nM, such as less than 500 pM.
   56. Amino acid sequence according to any of aspects 43 to 55, that is a naturally occurring amino acid sequence (from any suitable species) or a synthetic or semi-synthetic amino acid sequence.
   57. Amino acid sequence according to any of aspects 43 to 56, that comprises an immunoglobulin fold or that under suitable conditions is capable of forming an immunoglobulin fold.
   58. Amino acid sequence according to any of aspects 43 to 57, that is an immunoglobulin sequence.
   59. Amino acid sequence according to any of aspects 43 to 58, that is a naturally occurring immunoglobulin sequence (from any suitable species) or a synthetic or semi-synthetic immunoglobulin sequence.
   60. Amino acid sequence according to any of aspects 43 to 59, that is a humanized immunoglobulin sequence, a camelized immunoglobulin sequence or an immunoglobulin sequence that has been obtained by techniques such as affinity maturation.
   61. Amino acid sequence according to any of aspects 43 to 60, that essentially consists of a light chain variable domain sequence (e.g. a V_{L}-sequence); or of a heavy chain variable domain sequence (e.g. a V_{H}-sequence).
   62. Amino acid sequence according to any of aspects 43 to 61, that essentially consists of a heavy chain variable domain sequence that is derived from a conventional four-chain antibody or that essentially consist of a heavy chain variable domain sequence that is derived from heavy chain antibody.
   63. Amino acid sequence according to any of aspects 43 to 62, that essentially consists of a domain antibody (or an amino acid sequence that is suitable for use as a domain antibody), of a single domain antibody (or an amino acid sequence that is suitable for use as a single domain antibody), of a “dAb” (or an amino acid sequence that is suitable for use as a dAb) or of a Nanobody (including but not limited to a V_{HH} sequence).
   64. Amino acid sequence according to any of aspects 43 to 63, that essentially consists of a Nanobody.
   65. Amino acid sequence according to any of aspects 43 to 64, that essentially consists of a Nanobody that
[0908] i) has 80% amino acid identity with at least one of the amino acid sequences of SEQ ID NO□s: 1 to 22, in which for the purposes of determining the degree of amino acid identity, the amino acid residues that form the CDR sequences are disregarded;
   and in which:
[0909] ii) preferably one or more of the amino acid residues at positions 11, 37, 44, 45, 47, 83, 84, 103, 104 and 108 according to the Kabat numbering are chosen from the Hallmark residues mentioned in Table B-2.
   66. Amino acid sequence according to any of aspects 43 to 65, that essentially consists of a Nanobody that
[0910] i) has 80% amino acid identity with at least one of the amino acid sequences of SEQ ID NO□1316 to 1487, in which for the purposes of determining the degree of amino acid identity, the amino acid residues that form the CDR sequences are disregarded;
   and in which:
[0911] ii) preferably one or more of the amino acid residues at positions 11, 37, 44, 45, 47, 83, 84, 103, 104 and 108 according to the Kabat numbering are chosen from the Hallmark residues mentioned in Table B-2.
   67. Amino acid sequence according to any of aspects 43 to 66, that essentially consists of a humanized Nanobody.
   68. Amino acid sequence according to any of the preceding aspects, that in addition to the at least one binding site for binding formed by the CDR sequences, contains one or more further binding sites for binding against other antigens, proteins or targets.
   69. Nanobody that is directed against and/or that can specifically bind to an integrin including human integrin, preferably to a subunit of integrin selected from the group consisting of alpha1, alpha2, alpha2b, alpha3, alpha4, alpha5, alpha6, alpha7, alpha8, alpha9, alpha10, alpha11, alphaE, alphaL, alphaM, alphaX, alphaV, alphaD, beta1, beta2, beta3, beta4, beta5, beta6, beta7, and beta8, more preferably to alpha3, alpha5, alphaL, alphaM, alphaV, beta1, beta2, beta6 and to any of the human forms of said integrins, e.g. for use as a therapeutic, preventative or diagnostic (e.g. for correlative imaging).
   70. Nanobody according to aspect 69, that is in essentially isolated form.
   71. Nanobody according to any of aspects 69 to 70, that can specifically bind to an integrin with a dissociation constant (K_{D}) of 10⁻⁵ to 10⁻¹² moles/litre or less, and preferably 10⁻⁷ to 10⁻¹² moles/litre or less and more preferably 10⁻⁸ to 10⁻¹² moles/litre.
   72. Nanobody according to any of aspects 69 to 71, that can specifically bind to an integrin with a rate of association (kₒₙ-rate) of between 10² M⁻¹s⁻¹ to about 10⁷ M⁻¹s⁻¹, preferably between 10³ M⁻¹s⁻¹ and 10⁷ M⁻¹s⁻¹, more preferably between 10⁴ M⁻¹s⁻¹ and 10⁷M⁻¹s⁻¹, such as between 10⁵ M⁻¹s⁻¹ and 10⁷ M⁻¹s⁻¹.
   73. Nanobody according to any of aspects 69 to 72, that can specifically bind to an integrin with a rate of dissociation (k_{off} rate) between 1 s¹ and 10⁻⁶ s⁻¹ preferably between 10⁻² s⁻¹ and 10⁻⁶ s⁻¹, more preferably between 10⁻³ s⁻¹ and 10⁻⁶ s⁻¹, such as between 10⁻⁴ s⁻¹ and 10⁻⁶ s⁻¹.
   74. Nanobody according to any of aspects 69 to 73, that can specifically bind to an integrin with an affinity less than 500 nM, preferably less than 200 nM, more preferably less than 10 nM, such as less than 500 pM.
   75. Nanobody according to any of aspects 69 to 74, that is a naturally occurring Nanobody (from any suitable species) or a synthetic or semi-synthetic Nanobody.
   76. Nanobody according to any of aspects 69 to 75, that is a V_{HH} sequence, a partially humanized VHH sequence, a fully humanized VHH sequence, a camelized heavy chain variable domain or a Nanobody that has been obtained by techniques such as affinity maturation.
   77. Nanobody according to any of aspects 69 to 76, that
[0912] iii) has 80% amino acid identity with at least one of the amino acid sequences of SEQ ID NO□s: 1 to 22, in which for the purposes of determining the degree of amino acid identity, the amino acid residues that form the CDR sequences are disregarded;
   and in which:
[0913] iv) preferably one or more of the amino acid residues at positions 11, 37, 44, 45, 47, 83, 84, 103, 104 and 108 according to the Kabat numbering are chosen from the Hallmark residues mentioned in Table B-2.
   78. Nanobody according to any of aspects 69 to 76, that
[0914] v) has 80% amino acid identity with at least one of the amino acid sequences of SEQ ID NO□ 131s6 to 1487, in which for the purposes of determining the degree of amino acid identity, the amino acid residues that form the CDR sequences are disregarded;
   and in which:
[0915] vi) preferably one or more of the amino acid residues at positions 11, 37, 44, 45, 47, 83, 84, 103, 104 and 108 according to the Kabat numbering are chosen from the Hallmark residues mentioned in Table B-2.
   79. Nanobody according to any of aspects 69 to 76, in which:
   [0916] CDR1 is chosen from the group consisting of:
[0917] a) the amino acid sequences of SEQ ID NO□ 296s to 465;
[0918] b) amino acid sequences that have at least 80% amino acid identity with at least one of the amino acid sequences of SEQ ID NO□ 296s to 465;
[0919] c) amino acid sequences that have 3, 2, or 1 amino acid difference with at least one of the amino acid sequences of SEQ ID NO□ 296s to 465;
   and/or
   [0920] CDR2 is chosen from the group consisting of:
[0921] d) the amino acid sequences of SEQ ID NO□ 636s to 805;
[0922] e) amino acid sequences that have at least 80% amino acid identity with at least one of the amino acid sequences of SEQ ID NO□636s to 805;
[0923] f) amino acid sequences that have 3, 2, or 1 amino acid difference with at least one of the amino acid sequences of SEQ ID NO□ 636s to 805;
   and/or
   [0924] CDR3 is chosen from the group consisting of:
[0925] g) the amino acid sequences of SEQ ID NO□ 976s to 1145;
[0926] h) amino acid sequences that have at least 80% amino acid identity with at least one of the amino acid sequences of SEQ ID NO□s: 976 to 1145;
[0927] i) amino acid sequences that have 3, 2, or 1 amino acid difference with at least one of the amino acid sequences of SEQ ID NO□s: 976 to 1145.
   80. Nanobody according to any of aspects 69 to 79, in which:
   [0928] CDR1 is chosen from the group consisting of:
[0929] a) the amino acid sequences of SEQ ID NO□ 296s to 465;
[0930] b) amino acid sequences that have at least 80% amino acid identity with at least one of the amino acid sequences of SEQ ID NO□ 296s to 465;
[0931] c) amino acid sequences that have 3, 2, or 1 amino acid difference with at least one of the amino acid sequences of SEQ ID NO□ 296s to 465;
   and
   [0932] CDR2 is chosen from the group consisting of:
[0933] d) the amino acid sequences of SEQ ID NO□ 636s to 805;
[0934] e) amino acid sequences that have at least 80% amino acid identity with at least one of the amino acid sequences of SEQ ID NO□ 636s to 805;
[0935] f) amino acid sequences that have 3, 2, or 1 amino acid difference with at least one of the amino acid sequences of SEQ ID NO□ 636s to 805;
   and
   [0936] CDR3 is chosen from the group consisting of:
[0937] g) the amino acid sequences of SEQ ID NO□ 976s to 1145;
[0938] h) amino acid sequences that have at least 80% amino acid identity with at least one of the amino acid sequences of SEQ ID NO□ 976s to 1145;
[0939] i) amino acid sequences that have 3, 2, or 1 amino acid difference with at least one of the amino acid sequences of SEQ ID NO□s: 976 to 1145.
   81. Nanobody according to any of aspects 69 to 80, in which the CDR sequences have at least 70% amino acid identity, preferably at least 80% amino acid identity, more preferably at least 90% amino acid identity, such as 95% amino acid identity or more or even essentially 100% amino acid identity with the CDR sequences of at least one of the amino acid sequences of SEQ ID NO□s: 13 [symbol] .
   82. Nanobody according to any of aspects 69 to 81, which is a partially humanized Nanobody.
   83. Nanobody according to any of aspects, which is a fully humanized Nanobody.
   84. Nanobody according to any of aspects 69 to 83, that is chosen from the group consisting of SEQ ID NO□s: 1316 to 1487 or from the group consisting of from amino acid sequences that have more than 80%, preferably more than 90%, more preferably more than 95%, such as 99% or more sequence identity (as defined herein) with at least one of the amino acid sequences of SEQ ID NO□s: 1316 to 1487.
   85. Nanobody directed against an integrin that cross-blocks the binding of at least one of the amino acid sequences according to any of previous aspects.
   86. Nanobody directed against an integrin that is cross-blocked from binding to an integrin by at least one of the amino acid sequences according to any of the previous aspects.
   87. Nanobody according to any of aspects 85 and 86 wherein the ability of said Nanobody to cross-block or to be cross-blocked is detected in a Biacore assay.
   88. Nanobody according to any of aspects 85 to 87 wherein the ability of said Nanobody to cross-block or to be cross-blocked is detected in an ELISA assay.
   89. Polypeptide that comprises or essentially consists of one or more amino acid sequences according to any of the previous aspects and/or one or more Nanobodies according to any of the previous aspects, and optionally further comprises one or more peptidic moieties.
   90. Polypeptide according to aspect 89, in which said one or more other peptidic moieties are chosen from the group consisting of domain antibodies, amino acid sequences that are suitable for use as a domain antibody, single domain antibodies, amino acid sequences that are suitable for use as a single domain antibody, “dAb”□s, amino acid sequences that are suitable for use as a dAb, or Nanobodies.
   91. Polypeptide according to any of aspects 89 to 90, in which said one or more amino acid sequences of the invention are chosen from the group consisting of domain antibodies, amino acid sequences that are suitable for use as a domain antibody, single domain antibodies, amino acid sequences that are suitable for use as a single domain antibody, “dAb”□s, amino acid sequences that are suitable for use as a dAb, or Nanobodies.
   92. Polypeptide, that comprises or essentially consists of one or more Nanobodies according to any of aspects 89 to 91 and in which said one or more other peptidic moieties are Nanobodies.
   93. Polypeptide according to any of aspects 89 to 91, that is a multivalent construct.
   94. Polypeptide according to any of aspects 89 to 91, that is a multispecific construct.
   95. Polypeptide according to any of aspects 89 to 91, that has an increased half-life.
   96. Polypeptide according to aspects 89 to 91, in which said one or more other peptidic moieties that provide the polypeptide with increased half-life is chosen from the group consisting of serum proteins or fragments thereof, binding units that can bind to serum proteins, an Fc portion, and small proteins or peptides that can bind to serum proteins.
   97. Polypeptide according to aspects 89 to 91, in which said one or more other peptidic moieties that provide the polypeptide with increased half-life is chosen from the group consisting of human serum albumin or fragments thereof.
   98. Polypeptide according to aspect 97, in which said one or more other peptidic moieties that provides the polypeptide with increased half-life are chosen from the group consisting of binding units that can bind to serum albumin (such as human serum albumin) or a serum immunoglobulin (such as IgG).
   99. Compound or construct, that comprises or essentially consists of one or more amino acid sequences according to any of previous aspects and/or one or more Nanobodies according to any previous aspects, and optionally further comprises one or more other groups, residues, moieties or binding units, optionally linked via one or more linkers.
   100. Compound or construct according to aspect 99 in which said one or more other groups, residues, moieties or binding units are amino acid sequences.
   101. Compound or construct according to aspect 99, in which said one or more linkers, if present, are one or more amino acid sequences.
   102. Compound or construct according to any of aspects 99 to 101, in which said one or more other groups, residues, moieties or binding units are immunoglobulin sequences.
   103. Compound or construct according to any of aspects 99 to 102, in which said one or more other groups, residues, moieties or binding units are chosen from the group consisting of domain antibodies, amino acid sequences that are suitable for use as a domain antibody, single domain antibodies, amino acid sequences that are suitable for use as a single domain antibody, “dAb”□s, amino acid sequence [symbol] suitable for use as a dAb, or Nanobodies.
   104. Compound or construct according to any of aspects 99 to 103 in which said one or more amino acid sequences of the invention are immunoglobulin sequences.
   105. Compound or construct according to any of aspects 99 to 104, in which said one or more amino acid sequences of the invention are chosen from the group consisting of domain antibodies, amino acid sequences that are suitable for use as a domain antibody, single domain antibodies, amino acid sequences that are suitable for use as a single domain antibody, “dAb”□s, amino acid sequences that are suitable for use as a dAb, or Nanobodies.
   106. Compound or construct, that comprises or essentially consists of one or more Nanobodies according to any of aspects 99 to 105 and in which said one or more other groups, residues, moieties or binding units are Nanobodies.
   107. Compound or construct according to any of aspects 99 to 106, which is a multivalent construct.
   108. Compound or construct according to any of aspects 99 to 106, which is a multispecific construct.
   109. Compound or construct according to aspect 99 to 106, in which said one or more other groups, residues, moieties or binding units provide the compound or construct with an increased half-life and said other groups, residues, moieties or binding units is chosen from the group consisting of serum proteins or fragments thereof, binding units that can bind to serum proteins, an Fc portion, and small proteins or peptides that can bind to serum proteins.
   110. Compound or construct according to aspect 109, in which said one or more other groups, residues, moieties or binding units that provide the compound or construct with increased half-life is chosen from the group consisting of human serum albumin or fragments thereof.
   111. Compound or construct according to aspect 109, in which said one or more other groups, residues, moieties or binding units that provides the compound or construct with increased half-life are chosen from the group consisting of binding units that can bind to serum albumin (such as human serum albumin) or a serum immunoglobulin (such as IgG).
   112. Compound or construct according to aspect 109, in which said one or more other groups, residues, moieties or binding units that provides the compound or construct with increased half-life are chosen from the group consisting of domain antibodies, amino acid sequences that are suitable for use as a domain antibody, single domain antibodies, amino acid sequences that are suitable for use as a single domain antibody, “dAb”□s, amino acid sequences that are suitable for use as a dAb, or Nanobodies that can bind to serum albumin (such as human serum albumin) or a serum immunoglobulin (such as IgG).
   113. Compound or construct according to aspect 109, in which said one or more other groups, residues, moieties or binding units that provides the compound or construct with increased half-life is a Nanobody that can bind to serum albumin (such as human serum albumin) or a serum immunoglobulin (such as IgG).
   114. Compound or construct according to any of aspects 109, that has a serum half-life that is at least 1.5 times, preferably at least 2 times, such as at least 5 times, for example at least 10 times or more than 20 times, greater than the half-life of the corresponding amino acid sequence according without the other groups, residues, moieties or binding units that provides the compound or construct with increased half-life.
   115. Compound or construct according to any of aspects 109 to 114, that has a serum half-life that is increased with more than 1 hours, preferably more than 2 hours, more preferably more than 6 hours, such as more than 12 hours, or even more than 24, 48 or 72 hours than the half-life of the corresponding amino acid sequence according without the other groups, residues, moieties or binding units that provides the compound or construct with increased half-life.
   116. Compound or construct according to any of aspects 109 to 115, that has a serum half-life in human of at least about 12 hours, preferably at least 24 hours, more preferably at least 48 hours, even more preferably at least 72 hours or more; for example, of at least 5 days (such as about 5 to 10 days), preferably at least 9 days (such as about 9 to 14 days), more preferably at least about 10 days (such as about 10 to 15 days), or at least about 11 days (such as about 11 to 16 days), more preferably at least about 12 days (such as about 12 to 18 days or more), or more than 14 days (such as about 14 to 19 days).
   117. Monovalent construct, comprising or essentially consisting of one amino acid sequence according to any of previous aspects and/or one Nanobody according to any of previous aspects.
   118. Monovalent construct according to aspect 117 in which said amino acid sequence of the invention is chosen from the group consisting of domain antibodies, amino acid sequences that are suitable for use as a domain antibody, single domain antibodies, amino acid sequences that are suitable for use as a single domain antibody, “dAb”□s, [symbol] amiitb a sequences that are suitable for use as a dAb, or Nanobodies.
   119. Monovalent construct, comprising or essentially consisting of one Nanobody according to any of the previous aspects.
   120. Pharmaceutical composition, comprising at least one amino acid sequence according to any of the previous aspects, Nanobody according to any of the previous aspects, compound or construct according to any of the previous aspects, monovalent construct according to any of the previous aspects.
   121. Composition of aspect 120, that further comprises at least one pharmaceutically acceptable carrier, diluent or excipient and/or adjuvant, and that optionally comprises one or more further pharmaceutically active polypeptides and/or compounds.
   122. Nucleic acid or nucleotide sequence, that encodes an amino acid sequence according to any of the previous aspects, a Nanobody according to any of the previous aspects, a compound or construct according to any of previous aspects that is such that it can be obtained by expression of a nucleic acid or nucleotide sequence encoding the same, or a monovalent construct according to any of the previous aspects.
   123. Nucleic acid or nucleotide sequence according to aspect 122, that is in the form of a genetic construct.
   124. Host or host cell that expresses, or that under suitable circumstances is capable of expressing, an amino acid sequence according to any of previous aspects, a Nanobody according to any of previous aspects, a compound or construct according to any of previous aspects that is such that it can be obtained by expression of a nucleic acid or nucleotide sequence encoding the same, or a monovalent construct according to any of previous aspects and/or that comprises a nucleic acid or nucleotide sequence according to previous aspects, or a genetic construct according to previous aspects.
   125. Method for producing an amino acid sequence according to any of previous aspects, a Nanobody according to any of previous aspects, a compound or construct according to any of aspects, pharmaceutical composition according to previous aspects that is such that it can be obtained by expression of a nucleic acid or nucleotide sequence encoding the same, or a monovalent construct according to any of previous aspects said method at least comprising the steps of:
[0940] a) expressing, in a suitable host cell or host organism or in another suitable expression system, a nucleic acid or nucleotide sequence according to previous aspects or a genetic construct according to any of the previous aspects
   optionally followed by:
[0941] b) isolating and/or purifying the amino acid sequence according to any of the previous aspects, the Nanobody according to any of the previous aspects, the compound or construct according to any of the previous aspects that is such that it can be obtained by expression of a nucleic acid or nucleotide sequence encoding the same, or the monovalent construct according to any of the previous aspects thus obtained.
   126. Method for producing an amino acid sequence according to any of previous aspects, a Nanobody according to any of previous aspects, a compound or construct according to any of previous aspects, pharmaceutical composition according to any of previous aspects that is such that it can be obtained by expression of a nucleic acid or nucleotide sequence encoding the same, or a monovalent construct according to any of previous aspects, said method at least comprising the steps of:
[0942] a) cultivating and/or maintaining a host or host cell according to any of previous aspects under conditions that are such that said host or host cell expresses and/or produces at least one amino acid sequence according to any of previous aspects, Nanobody according to any of previous aspects, compound or construct according to any of previous aspects that is such that it can be obtained by expression of a nucleic acid or nucleotide sequence encoding the same or a monovalent construct according to any of previous aspects,
   optionally followed by:
[0943] b) isolating and/or purifying the amino acid sequence according to any of aspects . . . , the Nanobody according to any of previous aspects, the compound or construct according to any of previous aspects that is such that it can be obtained by expression of a nucleic acid or nucleotide sequence encoding the same, or the monovalent construct according to any of previous aspects thus obtained
   127. Method for screening amino acid sequences directed against an integrin as e.g. shown in aspect 1 that comprises at least the steps of:
[0944] d) providing a set, collection or library of nucleic acid sequences encoding amino acid sequences;
[0945] e) screening said set, collection or library of nucleic acid sequences for nucleic acid sequences that encode an amino acid sequence that can bind to and/or has affinity for an integrin and that is cross-blocked or is cross blocking a Nanobody of the invention, e.g. SEQ ID NO: 1316 to 1487 (table-1); and
[0946] f) isolating said nucleic acid sequence, followed by expressing said amino acid sequence.
   128. Method for the prevention and/or treatment of at least one autoimmune diseases, cancer metastasis and thrombotic vascular diseases, said method comprising administering, to a subject in need thereof, a pharmaceutically active amount of at least an agent as previously described.
   129. Method for the prevention and/or treatment of at least one disease or disorder that is associated with an integrin, with its biological or pharmacological activity, and/or with the biological pathways or signalling in which an integrin is involved, said method comprising administering, to a subject in need thereof, a pharmaceutically active amount of an agent of the invention.
   130. Use of an amino acid sequence that can bind to and/or has affinity for an integrin and that is cross-blocked or is cross blocking a Nanobody of the invention, e.g. SEQ ID NO: 1316 to 1487, preferably a polypeptide essentially consisting of two identical or different Nanobodies selected from the group consisting of SEQ ID NO: 1316 to 1484, even more preferably a Nanobody with SEQ ID NO: 1486 and 1487 for diagnostic purposes, i.e. for use in microscopy, e.g. immunofluresence microscopy.
   Even more preferred aspects:

[0947] 1. A single variable domain that specifically binds to at least one member of the integrins.

[0948] 2. The single variable domain according to aspect 1, wherein the member of the integrins is selected from the group consisting of the human members of the integrins.

[0949] 3. The single variable domain according to aspect 1, wherein the member of the integrins is selected from the group consisting of the alpha subunits and beta subunits.

[0950] 4. The single variable domain according to aspect 1, wherein the member of the integrins is selected from the group consisting of the human alpha subunits and human beta subunits.

[0951] 5. The single variable domain according to aspect 1, wherein the member of the integrins is selected from the group consisting of alpha1, alpha2, alpha2b, alpha3, alpha4, alpha5, alpha6, alpha7, alpha8, alpha9, alpha10, alpha11, alphaE, alphaL, alphaM, alphaX, alphaV, alphaD, beta1, beta2, beta3, beta4, beta5, beta6, beta7, and beta8.

[0952] 6. The single variable domain according to aspect 1, wherein the member of the Integrins is selected from the group consisting of the human variant of alpha1, alpha2, alpha2b, alpha3, alpha4, alpha5, alpha6, alpha7, alpha8, alpha9, alpha 10, alpha 11, alphaE, alphaL, alphaM, alphaX, alphaV, alphaD, beta1, beta2, beta3, beta4, beta5, beta6, beta7, and beta8.

[0953] 7. The single variable domain according to aspect 1, wherein the member of the Integrins is selected from the group consisting of the human variant of alpha3, alpha5, alphaL, alphaM, alphaV, beta1, beta2, beta6.

[0954] 8. The single variable domain according to aspect 1, wherein the single variable domain additionally blocks the interaction between at least one member of the integrins with at least one other member of the integrins-ligand family.

[0955] 9. The single variable domain according to aspect 1, wherein the single variable has one of the sequences selected from the group consisting of sequences with SEQ ID NO: 1316 to 1487.

[0956] 10. The single variable domain according to aspect 1, wherein the single variable domain is selected from the group consisting of a) single variable domains with sequences having SEQ ID NO: 1316 to 1487; and b) single variable domains with 80% sequence identity to at least one sequence selected from the group consisting of single variable domains with sequences having SEQ ID NO: 1316 to 1487.

[0957] 11. The single variable domain according to aspect 1, wherein the single variable domain is selected from the group consisting of a) single variable domains with sequences having SEQ ID NO: 1316 to 1487; and b) single variable domains with sequences having SEQ ID NO: 1316 to 1487, wherein up to 10 amino acid residues are replaced by naturally occurring amino acids and wherein said replaced amino acids are located within the framework regions.

[0958] 12. The single variable domain according to aspect 1, wherein the single variable domain is selected from the group consisting of a) single variable domains with sequences having SEQ ID NO: 1316 to 1487; and b) single variable domains with sequences having SEQ ID NO: 1316 to 1487, wherein up to 8 amino acid residues are replaced by naturally occurring amino acids and wherein said replaced amino acids are located within the framework regions.

[0959] 13. The single variable domain according to aspect 1, wherein the single variable domain is selected from the group consisting of a) single variable domains with sequences having SEQ ID NO: 1316 to 1487; and b) single variable domains with sequences having SEQ ID NO: 1316 to 1487, wherein up to 5 amino acid residues are replaced by naturally occurring amino acids and wherein said replaced amino acids are located within the framework regions.

[0960] 14. The single variable domain according to aspect 1, wherein the single variable domain is selected from the group consisting of a) single variable domains with sequences having SEQ ID NO: 1316 to 1487; and b) single variable domains with sequences having SEQ ID NO: 1316 to 1487, wherein up to 3 amino acid residues are replaced by naturally occurring amino acids and wherein said replaced amino acids are located within the framework regions.

[0961] 15. The single variable domain according to aspect 1, wherein the single variable domain is selected from the group consisting of a) single variable domains with sequences having SEQ ID NO: 1316 to 1487; and b) single variable domains with 80% sequence identity to at least one sequences selected from the group consisting of sequences having SEQ ID NO: 1316 to 1487; and wherein said selected single variable domain from group a) and b) binds to at least one member of the Integrins with a dissociation constant (K_{D}) of 10⁻⁷ to 10⁻¹² moles/liter or less.

[0962] 16. The single variable domain according to aspect 1, wherein the single variable domain is selected from the group consisting of a) single variable domains with sequences having SEQ ID NO: 1316 to 1487; and b) single variable domains with sequences having SEQ ID NO: 1316 to 1487, wherein up to 10 amino acid residues are replaced by naturally occurring amino acids and wherein said replaced amino acids are located within the framework regions; and wherein said selected single variable domain from group a) and b) binds to at least one member of the integrins with a dissociation constant (K_{D}) of 10⁻⁷ to 10⁻¹² moles/liter or less.

[0963] 17. The single variable domain according to aspect 1, wherein the single variable domain is selected from the group consisting of a) single variable domains with sequences having SEQ ID NO: 1316 to 1487; and b) single variable domains with sequences having SEQ ID NO: 1316 to 1487, wherein up to 8 amino acid residues are replaced by naturally occurring amino acids and wherein said replaced amino acids are located within the framework regions; and wherein said selected single variable domain from group a) and b) binds to at least one member of the integrins with a dissociation constant (K_{D}) of 10⁻⁷ to 10⁻¹² moles/liter or less.

[0964] 18. The single variable domain according to aspect 1, wherein the single variable domain is selected from the group consisting of a) single variable domains with sequences having SEQ ID NO: 1316 to 1487; and b) single variable domains with sequences having SEQ ID NO: 1316 to 1487, wherein up to 5 amino acid residues are replaced by naturally occurring amino acids and wherein said replaced amino acids are located within the framework regions; and wherein said selected single variable domain from group a) and b) binds to at least one member of the integrins with a dissociation constant (K_{D}) of 10⁻⁷ to 10⁻¹² moles/liter or less.

[0965] 19. The single variable domain according to aspect 1, wherein the single variable domain is selected from the group consisting of a) single variable domains with sequences having SEQ ID NO: 1316 to 1487; and b) single variable domains with sequences having SEQ ID NO: 1316 to 1487, wherein up to 3 amino acid residues are replaced by naturally occurring amino acids and wherein said replaced amino acids are located within the framework regions; and wherein said selected single variable domain from group a) and b) binds to at least one member of the integrins with a dissociation constant (K_{D}) of 10⁻⁷ to 10⁻¹² moles/liter or less.

[0966] 20. The single variable domain according to aspect 1, wherein the single variable domain is selected from the group consisting of a) single variable domains with sequences having SEQ ID NO: 1316 to 1487; and b) single variable domains with 80% sequence identity to at least one sequences selected from the group consisting of sequences having SEQ ID NO: 1316 to 1487; and wherein said selected single variable domain from group a) and b) binds to at least one member of the integrins with a dissociation constant (K_{D}) of 10⁻⁸ to 10⁻¹² moles/liter or less.

[0967] 21. The single variable domain according to aspect 1, wherein the single variable domain is selected from the group consisting of a) single variable domains with sequences having SEQ ID NO: 1316 to 1487; and b) single variable domains with sequences having SEQ ID NO: 1316 to 1487, wherein up to 10 amino acid residues are replaced by naturally occurring amino acids and wherein said replaced amino acids are located within the framework regions; and wherein said selected single variable domain from group a) and b) binds to at least one member of the integrins with a dissociation constant (K_{D}) of 10⁻⁸ to 10⁻¹² moles/liter or less.

[0968] 22. The single variable domain according to aspect 1, wherein the single variable domain is selected from the group consisting of a) single variable domains with sequences having SEQ ID NO: 1316 to 1487; and b) single variable domains with sequences SEQ ID NO: 1316 to 1487 wherein up to 8 amino acid residues are replaced by naturally occurring amino acids and wherein said replaced amino acids are located within the framework regions; and wherein said selected single variable domain from group a) and b) binds to at least one member of the integrins with a dissociation constant (K_{D}) of 10⁻⁸ to 10⁻¹² moles/liter or less.

[0969] 23. The single variable domain according to aspect 1, wherein the single variable domain is selected from the group consisting of a) single variable domains with sequences having SEQ ID NO: 1316 to 1487; and b) single variable domains with sequences having SEQ ID NO: 1316 to 1487, wherein up to 5 amino acid residues are replaced by naturally occurring amino acids and wherein said replaced amino acids are located within the framework regions; and wherein said selected single variable domain from group a) and b) binds to at least one member of the integrins with a dissociation constant (K_{D}) of 10⁻⁸ to 10⁻¹² moles/liter or less.

[0970] 24. The single variable domain according to aspect 1, wherein the single variable domain is selected from the group consisting of a) single variable domains with sequences having SEQ ID NO: 1316 to 1487; and b) single variable domains with sequences having SEQ ID NO: 1316 to 1487, wherein up to 3 amino acid residues are replaced by naturally occurring amino acids and wherein said replaced amino acids are located within the framework regions; and wherein said selected single variable domain from group a) and b) binds to at least one member of the integrins with a dissociation constant (K_{D}) of 10⁻⁸ to 10⁻¹² moles/liter or less.

[0971] 25. A single variable domain that specifically binds to at least the alpha L.

[0972] 26. The single variable domain according to aspect 25, binds to at least the human alpha L.

[0973] 27. The single variable domain according to aspect 25, binds to at least the mouse alpha L.

[0974] 28. The single variable domain according to aspect 25, wherein the single variable domain additionally blocks the interaction between alpha L with at least one single variable domain with sequences having SEQ ID NO: 1316 to 1344.

[0975] 29. The single variable domain according to aspect 25, wherein the single variable domain is selected from the group consisting of a) single variable domains with sequences having SEQ ID NO: 1316 to 1344; and b) single variable domains with 80% sequence identity to at least one sequence selected from the group consisting of single variable domains with sequences having SEQ ID NO: 1316 to 1344.

[0976] 30. The single variable domain according to aspect 25, wherein the single variable domain is selected from the group consisting of a) single variable domains with sequences having SEQ ID NO: 1316 to 1344; and b) single variable domains with sequences having SEQ ID NO: 1316 to 1344, wherein up to 10 amino acid residues are replaced by naturally occurring amino acids and wherein said replaced amino acids are located within the framework regions.

[0977] 31. The single variable domain according to aspect 25, wherein the single variable domain is selected from the group consisting of a) single variable domains with sequences having SEQ ID NO: 1316 to 1344; and b) single variable domains with sequences having SEQ ID NO: 1316 to 1344, wherein up to 8 amino acid residues are replaced by naturally occurring amino acids and wherein said replaced amino acids are located within the framework regions.

[0978] 32. The single variable domain according to aspect 25, wherein the single variable domain is selected from the group consisting of a) single variable domains with sequences having SEQ ID NO: 1316 to 1344; and b) single variable domains with sequences having SEQ ID NO: 1316 to 1344, wherein up to 5 amino acid residues are replaced by naturally occurring amino acids and wherein said replaced amino acids are located within the framework regions.

[0979] 33. The single variable domain according to aspect 25, wherein the single variable domain is selected from the group consisting of a) single variable domains with sequences having SEQ ID NO: 1316 to 1344; and b) single variable domains with sequences having SEQ ID NO: 1316 to 1344, wherein up to 3 amino acid residues are replaced by naturally occurring amino acids and wherein said replaced amino acids are located within the framework regions.

[0980] 34. The single variable domain according to aspect 25, wherein the single variable domain is selected from the group consisting of a) single variable domains with sequences having SEQ ID NO: 1316 to 1344; and b) single variable domains with 80% sequence identity to at least one sequences selected from the group consisting of sequences having SEQ ID NO: 1316 to 1344; and wherein said selected single variable domain from group a) and b) binds to at least human alpha L with a dissociation constant (K_{D}) of 10⁻⁷ to 10¹² moles/liter or less.

[0981] 35. The single variable domain according to aspect 25, wherein the single variable domain is selected from the group consisting of a) single variable domains with sequences having SEQ ID NO: 1316 to 1344; and b) single variable domains with sequences having SEQ ID NO: 1316 to 1344, wherein up to 10 amino acid residues are replaced by naturally occurring amino acids and wherein said replaced amino acids are located within the framework regions; and wherein said selected single variable domain from group a) and b) binds to at least human alpha L with a dissociation constant (K_{D}) of 10⁻⁷ to 10¹² moles/liter or less.

[0982] 36. The single variable domain according to aspect 25, wherein the single variable domain is selected from the group consisting of a) single variable domains with sequences having SEQ ID NO: 1316 to 1344; and b) single variable domains with sequences having SEQ ID NO: 1316 to 1344, wherein up to 8 amino acid residues are replaced by naturally occurring amino acids and wherein said replaced amino acids are located within the framework regions; and wherein said selected single variable domain from group a) and b) binds to at least human alpha L with a dissociation constant (K_{D}) of 10⁻⁷ to 10² moles/liter or less.

[0983] 37. The single variable domain according to aspect 25, wherein the single variable domain is selected from the group consisting of a) single variable domains with sequences having SEQ ID NO: 1316 to 1344; and b) single variable domains with sequences having SEQ ID NO: 1316 to 1344, wherein up to 5 amino acid residues are replaced by naturally occurring amino acids and wherein said replaced amino acids are located within the framework regions; and wherein said selected single variable domain from group a) and b) binds to at least human alpha L with a dissociation constant (K_{D}) of 10⁻⁷ to 10⁻¹² moles/liter or less.

[0984] 38. The single variable domain according to aspect 25, wherein the single variable domain is selected from the group consisting of a) single variable domains with sequences having SEQ ID NO: 1316 to 1344; and b) single variable domains with sequences having SEQ ID NO: 1316 to 1344, wherein up to 3 amino acid residues are replaced by naturally occurring amino acids and wherein said replaced amino acids are located within the framework regions; and wherein said selected single variable domain from group a) and b) binds to at least human alpha L with a dissociation constant (K_{D}) of 10⁻⁷ to 10⁻¹² moles/liter or less.

[0985] 39. The single variable domain according to aspect 25, wherein the single variable domain is selected from the group consisting of a) single variable domains with sequences having SEQ ID NO: 1316 to 1344; and b) single variable domains with 80% sequence identity to at least one sequences selected from the group consisting of sequences having SEQ ID NO: 1316 to 1344; and wherein said selected single variable domain from group a) and b) binds to human alpha L with a dissociation constant (K_{D}) of 10⁻⁸ to 10⁻¹² moles/liter or less.

[0986] 40. The single variable domain according to aspect 25, wherein the single variable domain is selected from the group consisting of a) single variable domains with sequences having SEQ ID NO: 1316 to 1344; and b) single variable domains with sequences having SEQ ID NO: 1316 to 1344, wherein up to 10 amino acid residues are replaced by naturally occurring amino acids and wherein said replaced amino acids are located within the framework regions; and wherein said selected single variable domain from group a) and b) binds to at least human alpha L with a dissociation constant (K_{D}) of 10⁻⁸ to 10⁻¹² moles/liter or less.

[0987] 41. The single variable domain according to aspect 25, wherein the single variable domain is selected from the group consisting of a) single variable domains with sequences having SEQ ID NO: 1316 to 1344; and b) single variable domains with sequences having SEQ ID NO: 1316 to 1344, wherein up to 8 amino acid residues are replaced by naturally occurring amino acids and wherein said replaced amino acids are located within the framework regions; and wherein said selected single variable domain from group a) and b) binds to at least human alpha L with a dissociation constant (K_{D}) of 10⁻⁸ to 10⁻¹² moles/liter or less.

[0988] 42. The single variable domain according to aspect 25, wherein the single variable domain is selected from the group consisting of a) single variable domains with sequences having SEQ ID NO: 1316 to 1344; and b) single variable domains with sequences having SEQ ID NO: 1316 to 1344, wherein up to 5 amino acid residues are replaced by naturally occurring amino acids and wherein said replaced amino acids are located within the framework regions; and wherein said selected single variable domain from group a) and b) binds to at least human alpha L with a dissociation constant (K_{D}) of 10⁻⁸ to 10⁻¹² moles/liter or less.

[0989] 43. The single variable domain according to aspect 25, wherein the single variable domain is selected from the group consisting of a) single variable domains with sequences having SEQ ID NO: 1316 to 1344; and b) single variable domains with sequences having SEQ ID NO: 1316 to 1344, wherein up to 3 amino acid residues are replaced by naturally occurring amino acids and wherein said replaced amino acids are located within the framework regions; and wherein said selected single variable domain from group a) and b) binds to at least human alpha L with a dissociation constant (K_{D}) of 10⁻⁸ to 10⁻¹² moles/liter or less.

[0990] 44. A single variable domain that specifically binds to at least beta2.

[0991] 45. The single variable domain according to aspect 44, wherein the single variable domain that specifically binds to at least human beta2.

[0992] 46. The single variable domain according to aspect 44, wherein the single variable domain that specifically binds to at least mouse beta2.

[0993] 47. The single variable domain according to aspect 44, wherein the single variable domain additionally blocks the interaction between at least human beta2 with at least one single variable domain with sequences having SEQ ID NO: 1345 to 1394.

[0994] 48. The single variable domain according to aspect 44, wherein the single variable domain is selected from the group consisting of a) single variable domains with sequences having SEQ ID NO: 1345 to 1394; and b) single variable domains with 80% sequence identity to at least one sequence selected from the group consisting of single variable domains with sequences having SEQ ID NO: 1345 to 1394.

[0995] 49. The single variable domain according to aspect 44, wherein the single variable domain is selected from the group consisting of a) single variable domains with sequences having SEQ ID NO: 1345 to 1394; and b) single variable domains with sequences having SEQ ID NO: 1345 to 1394, wherein up to 10 amino acid residues are replaced by naturally occurring amino acids and wherein said replaced amino acids are located within the framework regions.

[0996] 50. The single variable domain according to aspect 44, wherein the single variable domain is selected from the group consisting of a) single variable domains with sequences having SEQ ID NO: 1345 to 1394; and b) single variable domains with sequences having SEQ ID NO: 1345 to 1394, wherein up to 8 amino acid residues are replaced by naturally occurring amino acids and wherein said replaced amino acids are located within the framework regions.

[0997] 51. The single variable domain according to aspect 44, wherein the single variable domain is selected from the group consisting of a) single variable domains with sequences having SEQ ID NO: 1345 to 1394; and b) single variable domains with sequences having SEQ ID NO: 1345 to 1394, wherein up to 5 amino acid residues are replaced by naturally occurring amino acids and wherein said replaced amino acids are located within the framework regions.

[0998] 52. The single variable domain according to aspect 44, wherein the single variable domain is selected from the group consisting of a) single variable domains with sequences having SEQ ID NO: 1345 to 1394; and b) single variable domains with sequences having SEQ ID NO: 1345 to 1394, wherein up to 3 amino acid residues are replaced by naturally occurring amino acids and wherein said replaced amino acids are located within the framework regions.

[0999] 53. The single variable domain according to aspect 44, wherein the single variable domain is selected from the group consisting of a) single variable domains with sequences having SEQ ID NO: 1345 to 1394; and b) single variable domains with 80% sequence identity to at least one sequences selected from the group consisting of sequences having SEQ ID NO: 1345 to 1394; and wherein said selected single variable domain from group a) and b) binds to at least human beta2 with a dissociation constant (K_{D}) of 10⁻⁷ to 10⁻¹² moles/liter or less.

[1000] 54. The single variable domain according to aspect 44, wherein the single variable domain is selected from the group consisting of a) single variable domains with sequences having SEQ ID NO: 1345 to 1394; and b) single variable domains with sequences having SEQ ID NO: 1345 to 1394, wherein up to 10 amino acid residues are replaced by naturally occurring amino acids and wherein said replaced amino acids are located within the framework regions; and wherein said selected single variable domain from group a) and b) binds to at least human beta2 with a dissociation constant (K_{D}) of 10⁻⁷ to 10⁻¹² moles/liter or less.

[1001] 55. The single variable domain according to aspect 44, wherein the single variable domain is selected from the group consisting of a) single variable domains with sequences having SEQ ID NO: 1345 to 1394; and b) single variable domains with sequences having SEQ ID NO: 1345 to 1394, wherein up to 8 amino acid residues are replaced by naturally occurring amino acids and wherein said replaced amino acids are located within the framework regions; and wherein said selected single variable domain from group a) and b) binds to at least human beta2 with a dissociation constant (K_{D}) of 10⁻⁷ to 10¹² moles/liter or less.

[1002] 56. The single variable domain according to aspect 44, wherein the single variable domain is selected from the group consisting of a) single variable domains with sequences having SEQ ID NO: 1345 to 1394; and b) single variable domains with sequences having SEQ ID NO: 1345 to 1394, wherein up to 5 amino acid residues are replaced by naturally occurring amino acids and wherein said replaced amino acids are located within the framework regions; and wherein said selected single variable domain from group a) and b) binds to at least human beta2 with a dissociation constant (K_{D}) of 10⁻⁷ to 10⁻¹² moles/liter or less.

[1003] 57. The single variable domain according to aspect 44, wherein the single variable domain is selected from the group consisting of a) single variable domains with sequences having SEQ ID NO: 1345 to 1394; and b) single variable domains with sequences having SEQ ID NO: 1345 to 1394, wherein up to 3 amino acid residues are replaced by naturally occurring amino acids and wherein said replaced amino acids are located within the framework regions; and wherein said selected single variable domain from group a) and b) binds to at least human beta2 with a dissociation constant (K_{D}) of 10⁻⁷ to 10⁻¹² moles/liter or less.

[1004] 58. The single variable domain according to aspect 44, wherein the single variable domain is selected from the group consisting of a) single variable domains with sequences having SEQ ID NO: 1345 to 1394; and b) single variable domains with 80% sequence identity to at least one sequences selected from the group consisting of sequences having SEQ ID NO: 1345 to 1394; and wherein said selected single variable domain from group a) and b) binds to at least human beta2 with a dissociation constant (K_{D}) of 10⁻⁸ to 10⁻¹² moles/liter or less.

[1005] 59. The single variable domain according to aspect 44, wherein the single variable domain is selected from the group consisting of a) single variable domains with sequences having SEQ ID NO: 1345 to 1394; and b) single variable domains with sequences having SEQ ID NO: 1345 to 1394, wherein up to 10 amino acid residues are replaced by naturally occurring amino acids and wherein said replaced amino acids are located within the framework regions; and wherein said selected single variable domain from group a) and b) binds to at least human beta2 with a dissociation constant (K_{D}) of 10⁻⁸ to 10⁻¹² moles/liter or less.

[1006] 60. The single variable domain according to aspect 44, wherein the single variable domain is selected from the group consisting of a) single variable domains with sequences having SEQ ID NO: 1345 to 1394; and b) single variable domains with sequences having SEQ ID NO: 1345 to 1394, wherein up to 8 amino acid residues are replaced by naturally occurring amino acids and wherein said replaced amino acids are located within the framework regions; and wherein said selected single variable domain from group a) and b) binds to at least human beta2 with a dissociation constant (K_{D}) of 10⁻⁸ to 10⁻¹² moles/liter or less.

[1007] 61. The single variable domain according to aspect 44, wherein the single variable domain is selected from the group consisting of a) single variable domains with sequences having SEQ ID NO: 1345 to 1394; and b) single variable domains with sequences having SEQ ID NO: 1345 to 1394, wherein up to 5 amino acid residues are replaced by naturally occurring amino acids and wherein said replaced amino acids are located within the framework regions; and wherein said selected single variable domain from group a) and b) binds to at least human beta2 with a dissociation constant (K_{D}) of 10⁻⁸ to 10⁻¹² moles/liter or less.

[1008] 62. The single variable domain according to aspect 44, wherein the single variable domain is selected from the group consisting of a) single variable domains with sequences having SEQ ID NO: 1345 to 1394; and b) single variable domains with sequences having SEQ ID NO: 1345 to 1394, wherein up to 3 amino acid residues are replaced by naturally occurring amino acids and wherein said replaced amino acids are located within the framework regions; and wherein said selected single variable domain from group a) and b) binds to at least human beta2 with a dissociation constant (K_{D}) of 10⁻⁸ to 10⁻² moles/liter or less.

[1009] 63. A single variable domain that specifically binds to at least alpha M.

[1010] 64. The single variable domain according to aspect 63, that specifically binds to at least human alpha M.

[1011] 65. The single variable domain according to aspect 63, that specifically binds to at least mouse alpha M.

[1012] 66. The single variable domain according to aspect 63, wherein the single variable domain additionally blocks the interaction between human alpha M with at least one single variable domain with sequences having SEQ ID NO: 1395 to 1408.

[1013] 67. The single variable domain according to aspect 63, wherein the single variable domain is selected from the group consisting of a) single variable domains with sequences having SEQ ID NO: 1395 to 1408; and b) single variable domains with 80% sequence identity to at least one sequence selected from the group consisting of single variable domains with sequences having SEQ ID NO: 1395 to 1408.

[1014] 68. The single variable domain according to aspect 63, wherein the single variable domain is selected from the group consisting of a) single variable domains with sequences having SEQ ID NO: 1395 to 1408; and b) single variable domains with sequences having SEQ ID NO: 1395 to 1408, wherein up to 10 amino acid residues are replaced by naturally occurring amino acids and wherein said replaced amino acids are located within the framework regions.

[1015] 69. The single variable domain according to aspect 63, wherein the single variable domain is selected from the group consisting of a) single variable domains with sequences having SEQ ID NO: 1395 to 1408; and b) single variable domains with sequences having SEQ ID NO: 1395 to 1408, wherein up to 8 amino acid residues are replaced by naturally occurring amino acids and wherein said replaced amino acids are located within the framework regions.

[1016] 70. The single variable domain according to aspect 63, wherein the single variable domain is selected from the group consisting of a) single variable domains with sequences having SEQ ID NO: 1395 to 1408; and b) single variable domains with sequences having SEQ ID NO: 1395 to 1408, wherein up to 5 amino acid residues are replaced by naturally occurring amino acids and wherein said replaced amino acids are located within the framework regions.

[1017] 71. The single variable domain according to aspect 63, wherein the single variable domain is selected from the group consisting of a) single variable domains with sequences having SEQ ID NO: 1395 to 1408; and b) single variable domains with sequences having SEQ ID NO: 1395 to 1408, wherein up to 3 amino acid residues are replaced by naturally occurring amino acids and wherein said replaced amino acids are located within the framework regions.

[1018] 72. The single variable domain according to aspect 63, wherein the single variable domain is selected from the group consisting of a) single variable domains with sequences having SEQ ID NO: 1395 to 1408; and b) single variable domains with 80% sequence identity to at least one sequences selected from the group consisting of sequences having SEQ ID NO: 1395 to 1408; and wherein said selected single variable domain from group a) and b) binds to human alpha M with a dissociation constant (K_{D}) of 10⁻⁷ to 10⁻¹² moles/liter or less.

[1019] 73. The single variable domain according to aspect 63, wherein the single variable domain is selected from the group consisting of a) single variable domains with sequences having SEQ ID NO: 1395 to 1408; and b) single variable domains with sequences having SEQ ID NO: 1395 to 1408, wherein up to 10 amino acid residues are replaced by naturally occurring amino acids and wherein said replaced amino acids are located within the framework regions; and wherein said selected single variable domain from group a) and b) binds to human alpha M with a dissociation constant (Kₒ) of 10⁻⁷ to 10⁻¹² moles/liter or less.

[1020] 74. The single variable domain according to aspect 63, wherein the single variable domain is selected from the group consisting of a) single variable domains with sequences having SEQ ID NO: 1395 to 1408; and b) single variable domains with sequences having SEQ ID NO: 1395 to 1408, wherein up to 8 amino acid residues are replaced by naturally occurring amino acids and wherein said replaced amino acids are located within the framework regions; and wherein said selected single variable domain from group a) and b) binds to human alpha M with a dissociation constant (K_{D}) of 10⁻⁷ to 10⁻¹² moles/liter or less.

[1021] 75. The single variable domain according to aspect 63, wherein the single variable domain is selected from the group consisting of a) single variable domains with sequences having SEQ ID NO: 1395 to 1408; and b) single variable domains with sequences having SEQ ID NO: 1395 to 1408, wherein up to 5 amino acid residues are replaced by naturally occurring amino acids and wherein said replaced amino acids are located within the framework regions; and wherein said selected single variable domain from group a) and b) binds to human alpha M with a dissociation constant (K_{D}) of 10⁻⁷ to 10⁻¹² moles/liter or less.

[1022] 76. The single variable domain according to aspect 63, wherein the single variable domain is selected from the group consisting of a) single variable domains with sequences having SEQ ID NO: 1395 to 1408; and b) single variable domains with sequences having SEQ ID NO: 1395 to 1408, wherein up to 3 amino acid residues are replaced by naturally occurring amino acids and wherein said replaced amino acids are located within the framework regions; and wherein said selected single variable domain from group a) and b) binds to human alpha M with a dissociation constant (K_{D}) of 10⁻⁷ to 10⁻¹² moles/liter or less.

[1023] 77. The single variable domain according to aspect 63, wherein the single variable domain is selected from the group consisting of a) single variable domains with sequences having SEQ ID NO: 1395 to 1408; and b) single variable domains with 80% sequence identity to at least one sequences selected from the group consisting of sequences having SEQ ID NO: 1395 to 1408; and wherein said selected single variable domain from group a) and b) binds to human alpha M with a dissociation constant (K_{D}) of 10⁻⁸ to 10⁻¹² moles/liter or less.

[1024] 78. The single variable domain according to aspect 63, wherein the single variable domain is selected from the group consisting of a) single variable domains with sequences having SEQ ID NO: 1395 to 1408; and b) single variable domains with sequences having SEQ ID NO: 1395 to 1408, wherein up to 10 amino acid residues are replaced by naturally occurring amino acids and wherein said replaced amino acids are located within the framework regions; and wherein said selected single variable domain from group a) and b) binds to human alpha M with a dissociation constant (K_{D}) of 10⁻⁸ to 10⁻¹² moles/liter or less.

[1025] 79. The single variable domain according to aspect 63, wherein the single variable domain is selected from the group consisting of a) single variable domains with sequences having SEQ ID NO: 1395 to 1408; and b) single variable domains with sequences having SEQ ID NO: 1395 to 1408, wherein up to 8 amino acid residues are replaced by naturally occurring amino acids and wherein said replaced amino acids are located within the framework regions; and wherein said selected single variable domain from group a) and b) binds to human alpha M with a dissociation constant (K_{D}) of 10⁻⁸ to 10⁻¹² moles/liter or less.

[1026] 80. The single variable domain according to aspect 63, wherein the single variable domain is selected from the group consisting of a) single variable domains with sequences having SEQ ID NO: 1395 to 1408; and b) single variable domains with sequences having SEQ ID NO: 1395 to 1408, wherein up to 5 amino acid residues are replaced by naturally occurring amino acids and wherein said replaced amino acids are located within the framework regions; and wherein said selected single variable domain from group a) and b) binds to human alpha M with a dissociation constant (K_{D}) of 10⁻⁸ to 10⁻¹² moles/liter or less.

[1027] 81. The single variable domain according to aspect 63, wherein the single variable domain is selected from the group consisting of a) single variable domains with sequences having SEQ ID NO: 1395 to 1408; and b) single variable domains with sequences having SEQ ID NO: 1395 to 1408, wherein up to 3 amino acid residues are replaced by naturally occurring amino acids and wherein said replaced amino acids are located within the framework regions; and wherein said selected single variable domain from group a) and b) binds to human alpha M with a dissociation constant (Kᵤ) of 10⁻⁸ to 10⁻¹² moles/liter or less.

[1028] 82. A single variable domain that specifically binds to at least alphaV or beta6.

[1029] 83. The single variable domain according to aspect 82, that specifically binds to at least human alphaV or human beta6.

[1030] 84. The single variable domain according to aspect 82, that specifically binds to at least mouse alphaV or mouse beta6.

[1031] 85. The single variable domain according to aspect 82, wherein the single variable domain additionally blocks the interaction between human alphaV or human beta6 with at least one single variable domain with sequences having SEQ ID NO: 1409 to 1426.

[1032] 86. The single variable domain according to aspect 82, wherein the single variable domain is selected from the group consisting of a) single variable domains with sequences having SEQ ID NO: 1409 to 1426; and b) single variable domains with 80% sequence identity to at least one sequence selected from the group consisting of single variable domains with sequences having SEQ ID NO: 1409 to 1426.

[1033] 87. The single variable domain according to aspect 82, wherein the single variable domain is selected from the group consisting of a) single variable domains with sequences having SEQ ID NO: 1409 to 1426; and b) single variable domains with sequences having SEQ ID NO: 1409 to 1426, wherein up to 10 amino acid residues are replaced by naturally occurring amino acids and wherein said replaced amino acids are located within the framework regions.

[1034] 88. The single variable domain according to aspect 82, wherein the single variable domain is selected from the group consisting of a) single variable domains with sequences having SEQ ID NO: 1409 to 1426; and b) single variable domains with sequences having SEQ ID NO: 1409 to 1426, wherein up to 8 amino acid residues are replaced by naturally occurring amino acids and wherein said replaced amino acids are located within the framework regions.

[1035] 89. The single variable domain according to aspect 82, wherein the single variable domain is selected from the group consisting of a) single variable domains with sequences having SEQ ID NO: 1409 to 1426; and b) single variable domains with sequences having SEQ ID NO: 1409 to 1426, wherein up to 5 amino acid residues are replaced by naturally occurring amino acids and wherein said replaced amino acids are located within the framework regions.

[1036] 90. The single variable domain according to aspect 82, wherein the single variable domain is selected from the group consisting of a) single variable domains with sequences having SEQ ID NO: 1409 to 1426; and b) single variable domains with sequences having SEQ ID NO: 1409 to 1426, wherein up to 3 amino acid residues are replaced by naturally occurring amino acids and wherein said replaced amino acids are located within the framework regions.

[1037] 91. The single variable domain according to aspect 82, wherein the single variable domain is selected from the group consisting of a) single variable domains with sequences having SEQ ID NO: 1409 to 1426; and b) single variable domains with 80% sequence identity to at least one sequences selected from the group consisting of sequences having SEQ ID NO: 1409 to 1426; and wherein said selected single variable domain from group a) and b) binds to human alphaV or human beta6 with a dissociation constant (K_{D}) of 10⁻⁷ to 10⁻¹² moles/liter or less.

[1038] 92. The single variable domain according to aspect 82, wherein the single variable domain is selected from the group consisting of a) single variable domains with sequences having SEQ ID NO: 1409 to 1426; and b) single variable domains with sequences having SEQ ID NO: 1409 to 1426, wherein up to 10 amino acid residues are replaced by naturally occurring amino acids and wherein said replaced amino acids are located within the framework regions; and wherein said selected single variable domain from group a) and b) binds to human alphaV or human beta6 with a dissociation constant (K_{D}) of 10⁻⁷ to 10⁻¹² moles/liter or less.

[1039] 93. The single variable domain according to aspect 82, wherein the single variable domain is selected from the group consisting of a) single variable domains with sequences having SEQ ID NO: 1409 to 1426; and b) single variable domains with sequences having SEQ ID NO: 1409 to 1426, wherein up to 8 amino acid residues are replaced by naturally occurring amino acids and wherein said replaced amino acids are located within the framework regions; and wherein said selected single variable domain from group a) and b) binds to human alphaV or human beta6 with a dissociation constant (K_{D}) of 10⁻⁷ to 10¹² moles/liter or less.

[1040] 94. The single variable domain according to aspect 82, wherein the single variable domain is selected from the group consisting of a) single variable domains with sequences having SEQ ID NO: 1409 to 1426; and b) single variable domains with sequences having SEQ ID NO: 1409 to 1426, wherein up to 5 amino acid residues are replaced by naturally occurring amino acids and wherein said replaced amino acids are located within the framework regions; and wherein said selected single variable domain from group a) and b) binds to human alphaV or human beta6 with a dissociation constant (K_{D}) of 10⁻⁷ to 10⁻¹² moles/liter or less.

[1041] 95. The single variable domain according to aspect 82, wherein the single variable domain is selected from the group consisting of a) single variable domains with sequences having SEQ ID NO: 1409 to 1426; and b) single variable domains with sequences having SEQ ID NO: 1409 to 1426, wherein up to 3 amino acid residues are replaced by naturally occurring amino acids and wherein said replaced amino acids are located within the framework regions; and wherein said selected single variable domain from group a) and b) binds to human alphaV or human beta6 with a dissociation constant (K_{D}) of 10⁻⁷ to 10⁻¹² moles/liter or less.

[1042] 96. The single variable domain according to aspect 82, wherein the single variable domain is selected from the group consisting of a) single variable domains with sequences having SEQ ID NO: 1409 to 1426; and b) single variable domains with 80% sequence identity to at least one sequences selected from the group consisting of sequences having SEQ ID NO: 1409 to 1426; and wherein said selected single variable domain from group a) and b) binds to human alphaV or human beta6 with a dissociation constant (K_{D}) of 10⁻⁷ to 10⁻¹² moles/liter or less.

[1043] 97. The single variable domain according to aspect 82, wherein the single variable domain is selected from the group consisting of a) single variable domains with sequences having SEQ ID NO: 1409 to 1426; and b) single variable domains with sequences having SEQ ID NO: 1409 to 1426, wherein up to 10 amino acid residues are replaced by naturally occurring amino acids and wherein said replaced amino acids are located within the framework regions; and wherein said selected single variable domain from group a) and b) binds to human alphaV or human beta6 with a dissociation constant (K_{D}) of 10⁻⁸ to 10⁻¹² moles/liter or less.

[1044] 98. The single variable domain according to aspect 82, wherein the single variable domain is selected from the group consisting of a) single variable domains with sequences having SEQ ID NO: 1409 to 1426; and b) single variable domains with sequences having SEQ ID NO: 1409 to 1426, wherein up to 8 amino acid residues are replaced by naturally occurring amino acids and wherein said replaced amino acids are located within the framework regions; and wherein said selected single variable domain from group a) and b) binds to human alphaV or human beta6 with a dissociation constant (K_{D}) of 10⁻⁸ to 10⁻¹² moles/liter or less.

[1045] 99. The single variable domain according to aspect 82, wherein the single variable domain is selected from the group consisting of a) single variable domains with sequences having SEQ ID NO: 1409 to 1426; and b) single variable domains with sequences having SEQ ID NO: 1409 to 1426, wherein up to 5 amino acid residues are replaced by naturally occurring amino acids and wherein said replaced amino acids are located within the framework regions; and wherein said selected single variable domain from group a) and b) binds to human alphaV or human beta6 with a dissociation constant (K_{D}) of 10⁻⁸ to 10⁻¹² moles/liter or less.

[1046] 100. The single variable domain according to aspect 82, wherein the single variable domain is selected from the group consisting of a) single variable domains with sequences having SEQ ID NO: 1409 to 1426; and b) single variable domains with sequences having SEQ ID NO: 1409 to 1426, wherein up to 3 amino acid residues are replaced by naturally occurring amino acids and wherein said replaced amino acids are located within the framework regions; and wherein said selected single variable domain from group a) and b) binds to human alphaV or human beta6 with a dissociation constant (K_{D}) of 10⁻⁸ to 10⁻¹² moles/liter or less.

[1047] 101. A single variable domain that specifically binds to at least beta1.

[1048] 102. The single variable domain according to aspect 101, that specifically binds to at least human beta1.

[1049] 103. The single variable domain according to aspect 101, that specifically binds to at least mouse beta1.

[1050] 104. The single variable domain according to aspect 101, wherein the single variable domain additionally blocks the interaction between human Beta1 with at least one single variable domain with sequences having SEQ ID NO: 1427 to 1450.

[1051] 105. The single variable domain according to aspect 101, wherein the single variable domain is selected from the group consisting of a) single variable domains with sequences having SEQ ID NO: 1427 to 1450; and b) single variable domains with 80% sequence identity to at least one sequence selected from the group consisting of single variable domains with sequences having SEQ ID NO: 1427 to 1450.

[1052] 106. The single variable domain according to aspect 101, wherein the single variable domain is selected from the group consisting of a) single variable domains with sequences having SEQ ID NO: 1427 to 1450; and b) single variable domains with sequences having SEQ ID NO: 1427 to 1450, wherein up to 10 amino acid residues are replaced by naturally occurring amino acids and wherein said replaced amino acids are located within the framework regions.

[1053] 107. The single variable domain according to aspect 101, wherein the single variable domain is selected from the group consisting of a) single variable domains with sequences having SEQ ID NO: 1427 to 1450; and b) single variable domains with sequences having SEQ ID NO: 1427 to 1450, wherein up to 8 amino acid residues are replaced by naturally occurring amino acids and wherein said replaced amino acids are located within the framework regions.

[1054] 108. The single variable domain according to aspect 101, wherein the single variable domain is selected from the group consisting of a) single variable domains with sequences having SEQ ID NO: 1427 to 1450; and b) single variable domains with sequences having SEQ ID NO: 1427 to 1450, wherein up to 5 amino acid residues are replaced by naturally occurring amino acids and wherein said replaced amino acids are located within the framework regions.

[1055] 109. The single variable domain according to aspect 101, wherein the single variable domain is selected from the group consisting of a) single variable domains with sequences having SEQ ID NO: 1427 to 1450; and b) single variable domains with sequences having SEQ ID NO: 1427 to 1450, wherein up to 3 amino acid residues are replaced by naturally occurring amino acids and wherein said replaced amino acids are located within the framework regions.

[1056] 110. The single variable domain according to aspect 101, wherein the single variable domain is selected from the group consisting of a) single variable domains with sequences having SEQ ID NO: 1427 to 1450; and b) single variable domains with 80% sequence identity to at least one sequences selected from the group consisting of sequences having SEQ ID NO: 1427 to 1450; and wherein said selected single variable domain from group a) and b) binds to human beta1 with a dissociation constant (K_{D}) of 10⁻⁷ to 10⁻¹² moles/liter or less.

[1057] 111. The single variable domain according to aspect 101, wherein the single variable domain is selected from the group consisting of a) single variable domains with sequences having SEQ ID NO: 1427 to 1450; and b) single variable domains with sequences having SEQ ID NO: 1427 to 1450, wherein up to 10 amino acid residues are replaced by naturally occurring amino acids and wherein said replaced amino acids are located within the framework regions; and wherein said selected single variable domain from group a) and b) binds to human beta1 with a dissociation constant (K_{D}) of 10⁻⁷ to 10⁻¹² moles/liter or less.

[1058] 112. The single variable domain according to aspect 101, wherein the single variable domain is selected from the group consisting of a) single variable domains with sequences having SEQ ID NO: 1427 to 1450; and b) single variable domains with sequences having SEQ ID NO: 1427 to 1450, wherein up to 8 amino acid residues are replaced by naturally occurring amino acids and wherein said replaced amino acids are located within the framework regions; and wherein said selected single variable domain from group a) and b) binds to human beta1 with a dissociation constant (K_{D}) of 10⁻⁷ to 10⁻¹² moles/liter or less.

[1059] 113. The single variable domain according to aspect 101, wherein the single variable domain is selected from the group consisting of a) single variable domains with sequences having SEQ ID NO: 1427 to 1450; and b) single variable domains sequences having SEQ ID NO: 1427 to 1450, wherein up to 5 amino acid residues are replaced by naturally occurring amino acids and wherein said replaced amino acids are located within the framework regions; and wherein said selected single variable domain from group a) and b) binds to human beta1 with a dissociation constant (K_{D}) of 10⁻⁷ to 10⁻¹² moles/liter or less.

[1060] 114. The single variable domain according to aspect 101, wherein the single variable domain is selected from the group consisting of a) single variable domains with sequences having SEQ ID NO: 1427 to 1450; and b) single variable domains with sequences having SEQ ID NO: 1427 to 1450, wherein up to 3 amino acid residues are replaced by naturally occurring amino acids and wherein said replaced amino acids are located within the framework regions; and wherein said selected single variable domain from group a) and b) binds to human beta1 with a dissociation constant (K_{D}) of 10⁻⁷ to 10⁻¹² moles/liter or less.

[1061] 115. The single variable domain according to aspect 101, wherein the single variable domain is selected from the group consisting of a) single variable domains with sequences having SEQ ID NO: 1427 to 1450; and b) single variable domains with 80% sequence identity to at least one sequences selected from the group consisting of sequences having SEQ ID NO: 1427 to 1450; and wherein said selected single variable domain from group a) and b) binds to human beta1 with a dissociation constant (K_{D}) of 10⁻⁸ to 10⁻¹² moles/liter or less.

[1062] 116. The single variable domain according to aspect 101, wherein the single variable domain is selected from the group consisting of a) single variable domains with sequences having SEQ ID NO: 1427 to 1450; and b) single variable domains with sequences having SEQ ID NO: 1427 to 1450, wherein up to 10 amino acid residues are replaced by naturally occurring amino acids and wherein said replaced amino acids are located within the framework regions; and wherein said selected single variable domain from group a) and b) binds to human beta1 with a dissociation constant (K_{D}) of 10⁻⁸ to 10⁻¹² moles/liter or less.

[1063] 117. The single variable domain according to aspect 101, wherein the single variable domain is selected from the group consisting of a) single variable domains with sequences having SEQ ID NO: 1427 to 1450; and b) single variable domains with sequences having SEQ ID NO: 1427 to 1450, wherein up to 8 amino acid residues are replaced by naturally occurring amino acids and wherein said replaced amino acids are located within the framework regions; and wherein said selected single variable domain from group a) and b) binds to human beta1 with a dissociation constant (K_{D}) of 10⁻⁸ to 10⁻¹² moles/liter or less.

[1064] 118. The single variable domain according to aspect 101, wherein the single variable domain is selected from the group consisting of a) single variable domains with sequences having SEQ ID NO: 1427 to 1450; and b) single variable domains with sequences having SEQ ID NO: 1427 to 1450, wherein up to 5 amino acid residues are replaced by naturally occurring amino acids and wherein said replaced amino acids are located within the framework regions; and wherein said selected single variable domain from group a) and b) binds to human beta1 with a dissociation constant (K_{D}) of 10⁻⁸ to 10⁻¹² moles/liter or less.

[1065] 119. The single variable domain according to aspect 101, wherein the single variable domain is selected from the group consisting of a) single variable domains with sequences having SEQ ID NO: 1427 to 1450; and b) single variable domains with sequences having SEQ ID NO: 1427 to 1450, wherein up to 3 amino acid residues are replaced by naturally occurring amino acids and wherein said replaced amino acids are located within the framework regions; and wherein said selected single variable domain from group a) and b) binds to human beta1 with a dissociation constant (K_{D}) of 10⁻⁸ to 10⁻¹² moles/liter or less.

[1066] 120. A single variable domain that specifically binds to at least alpha5.

[1067] 121. The single variable domain according to aspect 120, that specifically binds to at least human alpha5.

[1068] 122. The single variable domain according to aspect 120, that specifically binds to at least mouse alpha5.

[1069] 123. The single variable domain according to aspect 120, wherein the single variable domain additionally blocks the interaction between human alpha5 with at least one single variable domain with sequences having SEQ ID NO: 1451 to 1457.

[1070] 124. The single variable domain according to aspect 120, wherein the single variable domain is selected from the group consisting of a) single variable domains with sequences having SEQ ID NO: 1451 to 1457; and b) single variable domains with 80% sequence identity to at least one sequence selected from the group consisting of single variable domains with sequences having SEQ ID NO: 1451 to 1457.

[1071] 125. The single variable domain according to aspect 120, wherein the single variable domain is selected from the group consisting of a) single variable domains with sequences having SEQ ID NO: 1451 to 1457; and b) single variable domains with sequences having SEQ ID NO: 1451 to 1457, wherein up to 10 amino acid residues are replaced by naturally occurring amino acids and wherein said replaced amino acids are located within the framework regions.

[1072] 126. The single variable domain according to aspect 120, wherein the single variable domain is selected from the group consisting of a) single variable domains with sequences having SEQ ID NO: 1451 to 1457; and b) single variable domains with sequences having SEQ ID NO: 1451 to 1457, wherein up to 8 amino acid residues are replaced by naturally occurring amino acids and wherein said replaced amino acids are located within the framework regions.

[1073] 127. The single variable domain according to aspect 120, wherein the single variable domain is selected from the group consisting of a) single variable domains with sequences having SEQ ID NO: 1451 to 1457; and b) single variable domains with sequences having SEQ ID NO: 1451 to 1457, wherein up to 5 amino acid residues are replaced by naturally occurring amino acids and wherein said replaced amino acids are located within the framework regions.

[1074] 128. The single variable domain according to aspect 120, wherein the single variable domain is selected from the group consisting of a) single variable domains with sequences having SEQ ID NO: 1451 to 1457; and b) single variable domains with sequences having SEQ ID NO: 1451 to 1457, wherein up to 3 amino acid residues are replaced by naturally occurring amino acids and wherein said replaced amino acids are located within the framework regions.

[1075] 129. The single variable domain according to aspect 120, wherein the single variable domain is selected from the group consisting of a) single variable domains with sequences having SEQ ID NO: 1451 to 1457; and b) single variable domains with 80% sequence identity to at least one sequences selected from the group consisting of sequences having SEQ ID NO: 1451 to 1457; and wherein said selected single variable domain from group a) and b) binds to human alpha5 with a dissociation constant (K_{D}) of 10⁻⁷ to 10⁻¹² moles/liter or less.

[1076] 130. The single variable domain according to aspect 120, wherein the single variable domain is selected from the group consisting of a) single variable domains with sequences having SEQ ID NO: 1451 to 1457; and b) single variable domains with sequences having SEQ ID NO: 1451 to 1457, wherein up to 10 amino acid residues are replaced by naturally occurring amino acids and wherein said replaced amino acids are located within the framework regions; and wherein said selected single variable domain from group a) and b) binds to human alpha5 with a dissociation constant (K_{D}) of 10⁻⁷ to 10⁻¹² moles/liter or less.

[1077] 131. The single variable domain according to aspect 120, wherein the single variable domain is selected from the group consisting of a) single variable domains with sequences having SEQ ID NO: 1451 to 1457; and b) single variable domains with sequences having SEQ ID NO: 1451 to 1457, wherein up to 8 amino acid residues are replaced by naturally occurring amino acids and wherein said replaced amino acids are located within the framework regions; and wherein said selected single variable domain from group a) and b) binds to human alpha5 with a dissociation constant (K_{D}) of 10⁻⁷ to 10⁻¹² moles/liter or less.

[1078] 132. The single variable domain according to aspect 120, wherein the single variable domain is selected from the group consisting of a) single variable domains with sequences having SEQ ID NO: 1451 to 1457; and b) single variable domains with sequences having SEQ ID NO: 1451 to 1457, wherein up to 5 amino acid residues are replaced by naturally occurring amino acids and wherein said replaced amino acids are located within the framework regions; and wherein said selected single variable domain from group a) and b) binds to human alpha5 with a dissociation constant (K_{D}) of 10⁻⁷ to 10⁻¹² moles/liter or less.

[1079] 133. The single variable domain according to aspect 120, wherein the single variable domain is selected from the group consisting of a) single variable domains with sequences having SEQ ID NO: 1451 to 1457; and b) single variable domains with sequences having SEQ ID NO: 1451 to 1457, wherein up to 3 amino acid residues are replaced by naturally occurring amino acids and wherein said replaced amino acids are located within the framework regions; and wherein said selected single variable domain from group a) and b) binds to human alpha5 with a dissociation constant (K_{D}) of 10⁻⁷ to 10⁻¹² moles/liter or less.

[1080] 134. The single variable domain according to aspect 120, wherein the single variable domain is selected from the group consisting of a) single variable domains with sequences having SEQ ID NO: 1451 to 1457; and b) single variable domains with 80% sequence identity to at least one sequences selected from the group consisting of sequences having SEQ ID NO: 1451 to 1457; and wherein said selected single variable domain from group a) and b) binds to human alpha5 with a dissociation constant (K_{D}) of 10⁻⁸ to 10⁻¹² moles/liter or less.

[1081] 135. The single variable domain according to aspect 120, wherein the single variable domain is selected from the group consisting of a) single variable domains with sequences having SEQ ID NO: 1451 to 1457; and b) single variable domains with sequences having SEQ ID NO: 1451 to 1457, wherein up to 10 amino acid residues are replaced by naturally occurring amino acids and wherein said replaced amino acids are located within the framework regions; and wherein said selected single variable domain from group a) and b) binds to human alpha5 with a dissociation constant (K_{D}) of 10⁻⁸ to 10⁻¹² moles/liter or less.

[1082] 136. The single variable domain according to aspect 120, wherein the single variable domain is selected from the group consisting of a) single variable domains with sequences having SEQ ID NO: 1451 to 1457; and b) single variable domains with sequences having SEQ ID NO: 1451 to 1457, wherein up to 8 amino acid residues are replaced by naturally occurring amino acids and wherein said replaced amino acids are located within the framework regions; and wherein said selected single variable domain from group a) and b) binds to human alpha5 with a dissociation constant (K_{D}) of 10⁻⁸ to 10⁻¹² moles/liter or less.

[1083] 137. The single variable domain according to aspect 120, wherein the single variable domain is selected from the group consisting of a) single variable domains with sequences having SEQ ID NO: 1451 to 1457; and b) single variable domains with sequences having SEQ ID NO: 1451 to 1457, wherein up to 5 amino acid residues are replaced by naturally occurring amino acids and wherein said replaced amino acids are located within the framework regions; and wherein said selected single variable domain from group a) and b) binds to human alpha5 with a dissociation constant (K_{D}) of 10⁻⁸ to 10⁻¹² moles/liter or less.

[1084] 138. The single variable domain according to aspect 120, wherein the single variable domain is selected from the group consisting of a) single variable domains with sequences having SEQ ID NO: 1451 to 1457; and b) single variable domains with sequences having SEQ ID NO: 1451 to 1457, wherein up to 3 amino acid residues are replaced by naturally occurring amino acids and wherein said replaced amino acids are located within the framework regions; and wherein said selected single variable domain from group a) and b) binds to human alpha5 with a dissociation constant (K_{D}) of 10⁻⁸ to 10⁻¹² moles/liter or less.

[1085] 139. A single variable domain that specifically binds to at least alpha3.

[1086] 140. The single variable domain according to aspect 139, that specifically binds to at least human alpha3.

[1087] 141. The single variable domain according to aspect 139, that specifically binds to at least mouse alpha3.

[1088] 142. The single variable domain according to aspect 139, wherein the single variable domain additionally blocks the interaction between human alpha3 with at least one single variable domain with sequences having SEQ ID NO: 1458 to 1476, and SEQ ID NO: 1485, 1486, and 1487.

[1089] 143. The single variable domain according to aspect 139, wherein the single variable domain is selected from the group consisting of a) single variable domains with sequences having SEQ ID NO: 1458 to 1476, and SEQ ID NO: 1485, 1486, and 1487; and b) single variable domains with 80% sequence identity to at least one sequence selected from the group consisting of single variable domains with sequences having SEQ ID NO: 1458 to 1476, and SEQ ID NO: 1485, 1486, and 1487.

[1090] 144. The single variable domain according to aspect 139, wherein the single variable domain is selected from the group consisting of a) single variable domains with sequences having SEQ ID NO: 1458 to 1476, and SEQ ID NO: 1485, 1486, and 1487; and b) single variable domains with sequences having SEQ ID NO: 1458 to 1476, and SEQ ID NO: 1485, 1486, and 1487, wherein up to 10 amino acid residues are replaced by naturally occurring amino acids and wherein said replaced amino acids are located within the framework regions.

[1091] 145. The single variable domain according to aspect 139, wherein the single variable domain is selected from the group consisting of a) single variable domains with sequences having SEQ ID NO: 1458 to 1476, and SEQ ID NO: 1485, 1486, and 1487; and b) single variable domains with sequences having SEQ ID NO: 1458 to 1476, and SEQ ID NO: 1485, 1486, and 1487, wherein up to 8 amino acid residues are replaced by naturally occurring amino acids and wherein said replaced amino acids are located within the framework regions.

[1092] 146. The single variable domain according to aspect 139, wherein the single variable domain is selected from the group consisting of a) single variable domains with sequences having SEQ ID NO: 1458 to 1476, and SEQ ID NO: 1485, 1486, and 1487; and b) single variable domains with sequences having SEQ ID NO: 1458 to 1476, and SEQ ID NO: 1485, 1486, and 1487, wherein up to 5 amino acid residues are replaced by naturally occurring amino acids and wherein said replaced amino acids are located within the framework regions.

[1093] 147. The single variable domain according to aspect 139, wherein the single variable domain is selected from the group consisting of a) single variable domains with sequences having SEQ ID NO: 1458 to 1476, and SEQ ID NO: 1485, 1486, and 1487; and b) single variable domains with sequences having SEQ ID NO: 1458 to 1476, and SEQ ID NO: 1485, 1486, and 1487, wherein up to 3 amino acid residues are replaced by naturally occurring amino acids and wherein said replaced amino acids are located within the framework regions.

[1094] 148. The single variable domain according to aspect 139, wherein the single variable domain is selected from the group consisting of a) single variable domains with sequences having SEQ ID NO: 1458 to 1476, and SEQ ID NO: 1485, 1486, and 1487; and b) single variable domains with 80% sequence identity to at least one sequences selected from the group consisting of sequences having SEQ ID NO: 1458 to 1476, and SEQ ID NO: 1485, 1486, and 1487; and wherein said selected single variable domain from group a) and b) binds to human alpha3 with a dissociation constant (K_{D}) of 10⁻⁷ to 10⁻¹² moles/liter or less.

[1095] 149. The single variable domain according to aspect 139, wherein the single variable domain is selected from the group consisting of a) single variable domains with sequences having SEQ ID NO: 1458 to 1476, and SEQ ID NO: 1485, 1486, and 1487; and b) single variable domains with sequences having SEQ ID NO: 1458 to 1476, and SEQ ID NO: 1485, 1486, and 1487, wherein up to 10 amino acid residues are replaced by naturally occurring amino acids and wherein said replaced amino acids are located within the framework regions; and wherein said selected single variable domain from group a) and b) binds to human alpha3 with a dissociation constant (K_{D}) of 10⁻⁷ to 10⁻¹² moles/liter or less.

[1096] 150. The single variable domain according to aspect 139, wherein the single variable domain is selected from the group consisting of a) single variable domains with sequences having SEQ ID NO: 1458 to 1476, and SEQ ID NO: 1485, 1486, and 1487; and b) single variable domains with sequences having SEQ ID NO: 1458 to 1476, and SEQ ID NO: 1485, 1486, and 1487, wherein up to 8 amino acid residues are replaced by naturally occurring amino acids and wherein said replaced amino acids are located within the framework regions; and wherein said selected single variable domain from group a) and b) binds to human alpha3 with a dissociation constant (K_{D}) of 10⁻⁷ to 10⁻¹² moles/liter or less.

[1097] 151. The single variable domain according to aspect 139, wherein the single variable domain is selected from the group consisting of a) single variable domains with sequences having SEQ ID NO: 1458 to 1476, and SEQ ID NO: 1485, 1486, and 1487; and b) single variable domains with sequences having SEQ ID NO: 1458 to 1476, and SEQ ID NO: 1485, 1486, and 1487, wherein up to 5 amino acid residues are replaced by naturally occurring amino acids and wherein said replaced amino acids are located within the framework regions; and wherein said selected single variable domain from group a) and b) binds to human alpha3 with a dissociation constant (K_{D}) of 10⁻⁷ to 10⁻¹² moles/liter or less.

[1098] 152. The single variable domain according to aspect 139, wherein the single variable domain is selected from the group consisting of a) single variable domains with sequences having SEQ ID NO: 1458 to 1476, and SEQ ID NO: 1485, 1486, and 1487; and b) single variable domains with sequences having SEQ ID NO: 1458 to 1476, and SEQ ID NO: 1485, 1486, and 1487, wherein up to 3 amino acid residues are replaced by naturally occurring amino acids and wherein said replaced amino acids are located within the framework regions; and wherein said selected single variable domain from group a) and b) binds to human alpha3 with a dissociation constant (K_{D}) of 10⁻⁷ to 10⁻¹² moles/liter or less.

[1099] 153. The single variable domain according to aspect 139, wherein the single variable domain is selected from the group consisting of a) single variable domains with sequences having SEQ ID NO: 1458 to 1476, and SEQ ID NO: 1485, 1486, and 1487; and b) single variable domains with 80% sequence identity to at least one sequences selected from the group consisting of sequences having SEQ ID NO: 1458 to 1476, and SEQ ID NO: 1485, 1486, and 1487; and wherein said selected single variable domain from group a) and b) binds to human alpha3 with a dissociation constant (K_{D}) of 10⁻⁸ to 10⁻¹² moles/liter or less.

[1100] 154. The single variable domain according to aspect 139, wherein the single variable domain is selected from the group consisting of a) single variable domains with sequences having SEQ ID NO: 1458 to 1476, and SEQ ID NO: 1485, 1486, and 1487; and b) single variable domains with sequences having SEQ ID NO: 1458 to 1476, and SEQ ID NO: 1485, 1486, and 1487, wherein up to 10 amino acid residues are replaced by naturally occurring amino acids and wherein said replaced amino acids are located within the framework regions; and wherein said selected single variable domain from group a) and b) binds to human alpha3 with a dissociation constant (IC_{D}) of 10⁻⁸ to 10⁻¹² moles/liter or less.

[1101] 155. The single variable domain according to aspect 139, wherein the single variable domain is selected from the group consisting of a) single variable domains with sequences having SEQ ID NO: 1458 to 1476, and SEQ ID NO: 1485, 1486, and 1487; and b) single variable domains with sequences having SEQ ID NO: 1458 to 1476, and SEQ ID NO: 1485, 1486, and 1487, wherein up to 8 amino acid residues are replaced by naturally occurring amino acids and wherein said replaced amino acids are located within the framework regions; and wherein said selected single variable domain from group a) and b) binds to human alpha3 with a dissociation constant (K_{D}) of 10⁻⁸ to 10⁻¹² moles/liter or less.

[1102] 156. The single variable domain according to aspect 139, wherein the single variable domain is selected from the group consisting of a) single variable domains with sequences having SEQ ID NO: 1458 to 1476, and SEQ ID NO: 1485, 1486, and 1487; and b) single variable domains with sequences having SEQ ID NO: 1458 to 1476, and SEQ ID NO: 1485, 1486, and 1487, wherein up to 5 amino acid residues are replaced by naturally occurring amino acids and wherein said replaced amino acids are located within the framework regions; and wherein said selected single variable domain from group a) and b) binds to human alpha3 with a dissociation constant (K_{D}) of 10⁻⁸ to 10⁻¹² moles/liter or less.

[1103] 157. The single variable domain according to aspect 139, wherein the single variable domain is selected from the group consisting of a) single variable domains with sequences having SEQ ID NO: 1458 to 1476, and SEQ ID NO: 1485, 1486, and 1487; and b) single variable domains with sequences having SEQ ID NO: 1458 to 1476, and SEQ ID NO: 1485, 1486, and 1487, wherein up to 3 amino acid residues are replaced by naturally occurring amino acids and wherein said replaced amino acids are located within the framework regions; and wherein said selected single variable domain from group a) and b) binds to human alpha3 with a dissociation constant (K_{D}) of 10⁻⁸ to 10⁻¹² moles/liter or less.

[1104] 158. A single variable domain that specifically binds to at least human alpha3.

[1105] 159. The single variable domain according to aspect 158, wherein the single variable domain additionally blocks the interaction between human alpha3 with at least one single variable domain with sequences having SEQ ID NO: 1485 to 1487.

[1106] 160. The single variable domain according to aspect 158, wherein the single variable domain is selected from the group consisting of a) single variable domains with sequences having SEQ ID NO: 1485 to 1487; and b) single variable domains with 80% sequence identity to at least one sequence selected from the group consisting of single variable domains with sequences having SEQ ID NO: 1485 to 1487.

[1107] 161. The single variable domain according to aspect 158, wherein the single variable domain is selected from the group consisting of a) single variable domains with sequences having SEQ ID NO: 1485 to 1487; and b) single variable domains with sequences having SEQ ID NO: 1485 to 1487, wherein up to 10 amino acid residues are replaced by naturally occurring amino acids and wherein said replaced amino acids are located within the framework regions.

[1108] 162. The single variable domain according to aspect 158, wherein the single variable domain is selected from the group consisting of a) single variable domains with sequences having SEQ ID NO: 1485 to 1487; and b) single variable domains with sequences having SEQ ID NO: 1485 to 1487, wherein up to 8 amino acid residues are replaced by naturally occurring amino acids and wherein said replaced amino acids are located within the framework regions.

[1109] 163. The single variable domain according to aspect 158, wherein the single variable domain is selected from the group consisting of a) single variable domains with sequences having SEQ ID NO: 1485 to 1487; and b) single variable domains with sequences having SEQ ID NO: 1485 to 1487, wherein up to 5 amino acid residues are replaced by naturally occurring amino acids and wherein said replaced amino acids are located within the framework regions.

[1110] 164. The single variable domain according to aspect 158, wherein the single variable domain is selected from the group consisting of a) single variable domains with sequences having SEQ ID NO: 1485 to 1487; and b) single variable domains with sequences having SEQ ID NO: 1485 to 1487, wherein up to 3 amino acid residues are replaced by naturally occurring amino acids and wherein said replaced amino acids are located within the framework regions.

[1111] 165. The single variable domain according to aspect 158, wherein the single variable domain is selected from the group consisting of a) single variable domains with sequences having SEQ ID NO: 1485 to 1487; and b) single variable domains with 80% sequence identity to at least one sequences selected from the group consisting of sequences having SEQ ID NO: 1485 to 1487; and wherein said selected single variable domain from group a) and b) binds to human alpha3 or human beta1 with a dissociation constant (K_{D}) of 10⁻⁷ to 10⁻¹² moles/liter or less.

[1112] 166. The single variable domain according to aspect 158, wherein the single variable domain is selected from the group consisting of a) single variable domains with sequences having SEQ ID NO: 1485 to 1487; and b) single variable domains with sequences having SEQ ID NO: 1485 to 1487, wherein up to 10 amino acid residues are replaced by naturally occurring amino acids and wherein said replaced amino acids are located within the framework regions; and wherein said selected single variable domain from group a) and b) binds to human alpha3 or human beta1 with a dissociation constant (K_{D}) of 10⁻⁷ to 10⁻¹² moles/liter or less.

[1113] 167. The single variable domain according to aspect 158, wherein the single variable domain is selected from the group consisting of a) single variable domains with sequences having SEQ ID NO: 1485 to 1487; and b) single variable domains with, sequences having SEQ ID NO: 1485 to 1487, wherein up to 8 amino acid residues are replaced by naturally occurring amino acids and wherein said replaced amino acids are located within the framework regions; and wherein said selected single variable domain from group a) and b) binds to human alpha3 or human beta1 with a dissociation constant (K_{D}) of 10⁻⁷ to 10¹² moles/liter or less.

[1114] 168. The single variable domain according to aspect 158, wherein the single variable domain is selected from the group consisting of a) single variable domains with sequences having SEQ ID NO: 1485 to 1487; and b) single variable domains with sequences having SEQ ID NO: 1485 to 1487, wherein up to 5 amino acid residues are replaced by naturally occurring amino acids and wherein said replaced amino acids are located within the framework regions; and wherein said selected single variable domain from group a) and b) binds to human alpha3 or human beta1 with a dissociation constant (K_{D}) of 10⁻⁷ to 10⁻¹² moles/liter or less.

[1115] 169. The single variable domain according to aspect 158, wherein the single variable domain is selected from the group consisting of a) single variable domains with sequences having SEQ ID NO: 1485 to 1487; and b) single variable domains with sequences having SEQ ID NO: 1485 to 1487, wherein up to 3 amino acid residues are replaced by naturally occurring amino acids and wherein said replaced amino acids are located within the framework regions; and wherein said selected single variable domain from group a) and b) binds to human alpha3 or human beta1 with a dissociation constant (K_{D}) of 10⁻⁷ to 10⁻¹² moles/liter or less.

[1116] 170. The single variable domain according to aspect 158, wherein the single variable domain is selected from the group consisting of a) single variable domains with sequences having SEQ ID NO: 1485 to 1487; and b) single variable domains with 80% sequence identity to at least one sequences selected from the group consisting of sequences having SEQ ID NO: 1485 to 1487; and wherein said selected single variable domain from group a) and b) binds to human alpha3 or human beta1 with a dissociation constant (K_{D}) of 10⁻⁸ to 10⁻¹² moles/liter or less.

[1117] 171. The single variable domain according to aspect 158, wherein the single variable domain is selected from the group consisting of a) single variable domains with sequences having SEQ ID NO: 1485 to 1487; and b) single variable domains with sequences having SEQ ID NO: 1485 to 1487, wherein up to 10 amino acid residues are replaced by naturally occurring amino acids and wherein said replaced amino acids are located within the framework regions; and wherein said selected single variable domain from group a) and b) binds to human alpha3 or human beta1 with a dissociation constant (K_{D}) of 10⁻⁸ to 10⁻¹² moles/liter or less.

[1118] 172. The single variable domain according to aspect 158, wherein the single variable domain is selected from the group consisting of a) single variable domains with sequences having SEQ ID NO: 1485 to 1487; and b) single variable domains with sequences having SEQ ID NO: 1485 to 1487, wherein up to 8 amino acid residues are replaced by naturally occurring amino acids and wherein said replaced amino acids are located within the framework regions; and wherein said selected single variable domain from group a) and b) binds to human alpha3 or human beta1 with a dissociation constant (K_{D}) of 10⁻⁸ to 10⁻¹² moles/liter or less.

[1119] 173. The single variable domain according to aspect 158, wherein the single variable domain is selected from the group consisting of a) single variable domains with sequences having SEQ ID NO: 1485 to 1487; and b) single variable domains with sequences having SEQ ID NO: 1485 to 1487, wherein up to 5 amino acid residues are replaced by naturally occurring amino acids and wherein said replaced amino acids are located within the framework regions; and wherein said selected single variable domain from group a) and b) binds to human alpha3 or human beta1 with a dissociation constant (K_{D}) of 10⁻⁸ to 10⁻¹² moles/liter or less.

[1120] 174. The single variable domain according to aspect 158, wherein the single variable domain is selected from the group consisting of a) single variable domains with sequences having SEQ ID NO: 1485 to 1487; and b) single variable domains with sequences having SEQ ID NO: 1485 to 1487, wherein up to 3 amino acid residues are replaced by naturally occurring amino acids and wherein said replaced amino acids are located within the framework regions; and wherein said selected single variable domain from group a) and b) binds to human alpha3 or human beta1 with a dissociation constant (K_{D}) of 10⁻⁸ to 10⁻¹² moles/liter or less.

[1121] 175. A construct comprising at least one single variable domain of aspects 1 to 24.

[1122] 176. A construct comprising at least one single variable domain according to aspects 25 to 43.

[1123] 177. A construct comprising at least one single variable domain of aspects 44 to 62.

[1124] 178. A construct comprising at least one single variable domain of aspects 63 to 81.

[1125] 179. A construct comprising at least one single variable domain of aspects 82 to 100.

[1126] 180. A construct comprising at least one single variable domain of aspects 101 to 119.

[1127] 181. A construct comprising at least one single variable domain of aspects 120 to 138.

[1128] 182. A construct comprising at least one single variable domain of aspects 139 to 157.

[1129] 183. A construct comprising at least one single variable domain of aspects 158 to 174.

[1130] 184. A pharmaceutical composition comprising a single variable domain of aspects 1 to 174 and/or a construct of aspects 175 to 183.

[1131] 185. A nucleotide sequence encoding for a single variable domain of aspects 1 to 174 and/or a construct of aspects 175 to 183.

[1132] 186. A host cell able to express and/or comprising a single variable domain of aspects 1 to 174 and/or a construct of aspects 175 to 183, and/or a nucleotide sequence of aspect 185.

[1133] 187. Method of making a single variable domain of any aspects 1 to 174, method of making a construct of aspects 175 to 183; method of making a pharmaceutical composition of aspect 184; method of making a nucleotide sequence of aspect 185; and/or making a host cell of aspect 186.

[1134] 188. Method of screening a molecule specifically binding to a member of the Integrins using a single variable domain of aspects 1 to 174 or a construct of aspects 175 to 183, a pharmaceutical composition of aspect 184, a nucleotide sequence of aspect 185, and/or a host cell of aspect 186.

[1135] 189. Method for the prevention and/or treatment of at least one disease or disorder in which a member selected from the group consisting of the Integrins plays a role or is implicated, said method comprising administering, to a subject in need thereof, a pharmaceutically active amount of at least one single variable domain of aspects 1 to 174, one construct of aspects 175 to 183, or one pharmaceutical composition of aspect 184.

[1136] 190. Method for the prevention and/or treatment of at least one disease or disorder selected from the group of diseases consisting of cancers, an autoimmune diseases or neurodegenerative diseases, said method comprising administering, to a subject in need thereof, a pharmaceutically active amount of at least one single variable domain of aspects 1 to 174, one construct of aspects 175 to 183, or one pharmaceutical composition of aspect 184.

[1137] 191. Use of a pharmaceutically active amount of at least one single variable domain of aspects 1 to 174, one construct of aspects 175 to 183, or one pharmaceutical composition of aspect 184 for the prevention and/or treatment of at least one disease or disorder in which a member selected from the group consisting of the integrins plays a role or is implicated.

[1138] 192. Use of a pharmaceutically active amount of at least one single variable domain of aspects 1 to 174, one construct of aspects 175 to 183, or one pharmaceutical composition of aspect 184 for the prevention and/or treatment of at least one disease or disorder selected from the group of diseases consisting of cancers, an autoimmune diseases or neurodegenerative diseases.

[1139] 193. Use of a pharmaceutically active amount of at least one single variable domain of aspects 1 to 174, one construct of aspects 175 to 183, or one pharmaceutical composition of aspect 184 for the manufacture of a medicament for the prevention and/or treatment of at least one disease or disorder in which a member selected from the group consisting of the integrins plays a role or is implicated.

[1140] 194. Use of a pharmaceutically active amount of at least one single variable domain of aspects 1 to 174, one construct of aspects 175 to 183, or one pharmaceutical composition of aspect 184 for the manufacture of a medicament for the prevention and/or treatment of at least one disease or disorder selected from the group of diseases consisting of cancers, an autoimmune diseases or neurodegenerative diseases.

[1141] 195. Diagnostic kit comprising at least one single variable domain of aspects 1 to 174.

The application's sequence listing, which the Patent Office published only in electronic form, follows.

SEQUENCE LISTING (1488 sequences)

SEQ ID NO: 1 - protein, 102 aa, Artificial
  KERE-class Nanobody
  misc_feature (31)..(35): Xaa is any amino acid
  misc_feature (50)..(54): Xaa is any amino acid
  misc_feature (87)..(91): Xaa is any amino acid
EVQLVESGGGLVQPGGSLRLSCAASGIPFSXXXXXWFRQAPGKQRDSVAXXXXXRFTISRDNAKNTVYLQMNSLKPEDTAVYRCYFXXXXXWGQGTQVTVSS

SEQ ID NO: 2 - protein, 102 aa, Artificial
  KERE-class Nanobody
  misc_feature (31)..(35): Xaa is any amino acid
  misc_feature (50)..(54): Xaa is any amino acid
  misc_feature (87)..(91): Xaa is any amino acid
QVKLEESGGGLVQAGGSLRLSCVGSGRTFSXXXXXWFRLAPGKEREFVAXXXXXRFTISRDTASNRGYLHMNNLTPEDTAVYYCAAXXXXXWGQGTQVTVSS

SEQ ID NO: 3 - protein, 102 aa, Artificial
  KERE-class Nanobody
  misc_feature (31)..(35): Xaa is any amino acid
  misc_feature (50)..(54): Xaa is any amino acid
  misc_feature (87)..(91): Xaa is any amino acid
AVQLVDSGGGLVQAGDSLKLSCALTGGAFTXXXXXWFRQTPGREREFVAXXXXXRFTISRDNAKNMVYLRMNSLIPEDAAVYSCAAXXXXXWGQGTLVTVSS

SEQ ID NO: 4 - protein, 102 aa, Artificial
  KERE-class Nanobody
  misc_feature (31)..(35): Xaa is any amino acid
  misc_feature (50)..(54): Xaa is any amino acid
  misc_feature (87)..(91): Xaa is any amino acid
QVQLVESGGGLVEAGGSLRLSCTASESPFRXXXXXWFRQTSGQEREFVAXXXXXRFTISRDDAKNTVWLHGSTLKPEDTAVYYCAAXXXXXWGQGTQVTVSS

SEQ ID NO: 5 - protein, 102 aa, Artificial
  KERE-class Nanobody
  misc_feature (31)..(35): Xaa is any amino acid
  misc_feature (50)..(54): Xaa is any amino acid
  misc_feature (87)..(91): Xaa is any amino acid
AVQLVESGGGLVQGGGSLRLACAASERIFDXXXXXWYRQGPGNERELVAXXXXXRFTISMDYTKQTVYLHMNSLRPEDTGLYYCKIXXXXXWGQGTQVTVSS

SEQ ID NO: 6 - protein, 102 aa, Artificial
  KERE-class Nanobody
  misc_feature (31)..(35): Xaa is any amino acid
  misc_feature (50)..(54): Xaa is any amino acid
  misc_feature (87)..(91): Xaa is any amino acid
DVKFVESGGGLVQAGGSLRLSCVASGFNFDXXXXXWFRQAPGKEREEVAXXXXXRFTISSEKDKNSVYLQMNSLKPEDTALYICAGXXXXXWGRGTQVTVSS

SEQ ID NO: 7 - protein, 102 aa, Artificial
  KERE-class Nanobody
  misc_feature (31)..(35): Xaa is any amino acid
  misc_feature (50)..(54): Xaa is any amino acid
  misc_feature (87)..(91): Xaa is any amino acid
QVRLAESGGGLVQSGGSLRLSCVASGSTYTXXXXXWYRQYPGKQRALVAXXXXXRFTIARDSTKDTFCLQMNNLKPEDTAVYYCYAXXXXXWGQGTQVTVSS

SEQ ID NO: 8 - protein, 102 aa, Artificial
  KERE-class Nanobody
  misc_feature (31)..(35): Xaa is any amino acid
  misc_feature (50)..(54): Xaa is any amino acid
  misc_feature (87)..(91): Xaa is any amino acid
EVQLVESGGGLVQAGGSLRLSCAASGFTSDXXXXXWFRQAPGKPREGVSXXXXXRFTISTDNAKNTVHLLMNRVNAEDTALYYCAVXXXXXWGRGTRVTVSS

SEQ ID NO: 9 - protein, 102 aa, Artificial
  KERE-class Nanobody
  misc_feature (31)..(35): Xaa is any amino acid
  misc_feature (50)..(54): Xaa is any amino acid
  misc_feature (87)..(91): Xaa is any amino acid
QVQLVESGGGLVQPGGSLRLSCQASGDISTXXXXXWYRQVPGKLREFVAXXXXXRFTISGDNAKRAIYLQMNNLKPDDTAVYYCNRXXXXXWGQGTQVTVSP

SEQ ID NO: 10 - protein, 102 aa, Artificial
  KERE-class Nanobody
  misc_feature (31)..(35): Xaa is any amino acid
  misc_feature (50)..(54): Xaa is any amino acid
  misc_feature (87)..(91): Xaa is any amino acid
QVPVVESGGGLVQAGDSLRLFCAVPSFTSTXXXXXWFRQAPGKEREFVAXXXXXRFTISRNATKNTLTLRMDSLKPEDTAVYYCAAXXXXXWGQGTQVTVSS

SEQ ID NO: 11 - protein, 102 aa, Artificial
  KERE-class Nanobody
  misc_feature (31)..(35): Xaa is any amino acid
  misc_feature (50)..(54): Xaa is any amino acid
  misc_feature (87)..(91): Xaa is any amino acid
EVQLVESGGGLVQAGDSLRLFCTVSGGTASXXXXXWFRQAPGEKREFVAXXXXXRFTIARENAGNMVYLQMNNLKPDDTALYTCAAXXXXXWGRGTQVTVSS

SEQ ID NO: 12 - protein, 102 aa, Artificial
  KERE-class Nanobody
  misc_feature (31)..(35): Xaa is any amino acid
  misc_feature (50)..(54): Xaa is any amino acid
  misc_feature (87)..(91): Xaa is any amino acid
AVQLVESGGDSVQPGDSQTLSCAASGRTNSXXXXXWFRQAPGKERVFLAXXXXXRFTISRDSAKNMMYLQMNNLKPQDTAVYYCAAXXXXXWGQGTQVTVSS

SEQ ID NO: 13 - protein, 102 aa, Artificial
  KERE-class Nanobody
  misc_feature (31)..(35): Xaa is any amino acid
  misc_feature (50)..(54): Xaa is any amino acid
  misc_feature (87)..(91): Xaa is any amino acid
AVQLVESGGGLVQAGGSLRLSCVVSGLTSSXXXXXWFRQTPWQERDFVAXXXXXRFTISRDNYKDTVLLEMNFLKPEDTAIYYCAAXXXXXWGQGTQVTVSS

SEQ ID NO: 14 - protein, 102 aa, Artificial
  KERE-class Nanobody
  misc_feature (31)..(35): Xaa is any amino acid
  misc_feature (50)..(54): Xaa is any amino acid
  misc_feature (87)..(91): Xaa is any amino acid
AVQLVESGGGLVQAGASLRLSCATSTRTLDXXXXXWFRQAPGRDREFVAXXXXXRFTVSRDSAENTVALQMNSLKPEDTAVYYCAAXXXXXWGQGTRVTVSS

SEQ ID NO: 15 - protein, 102 aa, Artificial
  KERE-class Nanobody
  misc_feature (31)..(35): Xaa is any amino acid
  misc_feature (50)..(54): Xaa is any amino acid
  misc_feature (87)..(91): Xaa is any amino acid
QVQLVESGGGLVQPGGSLRLSCTVSRLTAHXXXXXWFRQAPGKEREAVSXXXXXRFTISRDYAGNTAFLQMDSLKPEDTGVYYCATXXXXXWGQGTQVTVSS

SEQ ID NO: 16 - protein, 102 aa, Artificial
  KERE-class Nanobody
  misc_feature (31)..(35): Xaa is any amino acid
  misc_feature (50)..(54): Xaa is any amino acid
  misc_feature (87)..(91): Xaa is any amino acid
EVQLVESGGELVQAGGSLKLSCTASGRNFVXXXXXWFRRAPGKEREFVAXXXXXRFTVSRDNGKNTAYLRMNSLKPEDTADYYCAVXXXXXLGSGTQVTVSS

SEQ ID NO: 17 - protein, 102 aa, Artificial
  GLEW-class Nanobody
  misc_feature (31)..(35): Xaa is any amino acid
  misc_feature (50)..(54): Xaa is any amino acid
  misc_feature (87)..(91): Xaa is any amino acid
AVQLVESGGGLVQPGGSLRLSCAASGFTFSXXXXXWVRQAPGKVLEWVSXXXXXRFTISRDNAKNTLYLQMNSLKPEDTAVYYCVKXXXXXGSQGTQVTVSS

SEQ ID NO: 18 - protein, 102 aa, Artificial
  GLEW-class Nanobody
  misc_feature (31)..(35): Xaa is any amino acid
  misc_feature (50)..(54): Xaa is any amino acid
  misc_feature (87)..(91): Xaa is any amino acid
EVQLVESGGGLVQPGGSLRLSCVCVSSGCTXXXXXWVRQAPGKAEEWVSXXXXXRFKISRDNAKKTLYLQMNSLGPEDTAMYYCQRXXXXXRGQGTQVTVSS

SEQ ID NO: 19 - protein, 102 aa, Artificial
  GLEW-class Nanobody
  misc_feature (31)..(35): Xaa is any amino acid
  misc_feature (50)..(54): Xaa is any amino acid
  misc_feature (87)..(91): Xaa is any amino acid
EVQLVESGGGLALPGGSLTLSCVFSGSTFSXXXXXWVRHTPGKAEEWVSXXXXXRFTISRDNAKNTLYLEMNSLSPEDTAMYYCGRXXXXXRSKGIQVTVSS

SEQ ID NO: 20 - protein, 102 aa, Artificial
  P,R,S 103-class Nanobody
  misc_feature (31)..(35): Xaa is any amino acid
  misc_feature (50)..(54): Xaa is any amino acid
  misc_feature (87)..(91): Xaa is any amino acid
AVQLVESGGGLVQAGGSLRLSCAASGRTFSXXXXXWFRQAPGKEREFVAXXXXXRFTISRDNAKNTVYLQMNSLKPEDTAVYYCAAXXXXXRGQGTQVTVSS

SEQ ID NO: 21 - protein, 102 aa, Artificial
  P,R,S 103-class Nanobody
  misc_feature (31)..(35): Xaa is any amino acid
  misc_feature (50)..(54): Xaa is any amino acid
  misc_feature (87)..(91): Xaa is any amino acid
DVQLVESGGDLVQPGGSLRLSCAASGFSFDXXXXXWLRQTPGKGLEWVGXXXXXRFTISRDNAKNMLYLHLNNLKSEDTAVYYCRRXXXXXLGQGTQVTVSS

SEQ ID NO: 22 - protein, 102 aa, Artificial; identical to SEQ ID NO: 18
  P,R,S 103-class Nanobody
  misc_feature (31)..(35): Xaa is any amino acid
  misc_feature (50)..(54): Xaa is any amino acid
  misc_feature (87)..(91): Xaa is any amino acid

SEQ ID NO: 23 - protein, 30 aa, Artificial
  KERE-class Nanobody FW1 sequence
QVQRVESGGGLVQAGGSLRLSCAASGRTSS

SEQ ID NO: 24 - protein, 30 aa, Artificial
  KERE-class Nanobody FW1 sequence
QVQLVESGGGLVQTGDSLSLSCSASGRTFS

SEQ ID NO: 25 - protein, 30 aa, Artificial
  KERE-class Nanobody FW1 sequence
QVKLEESGGGLVQAGDSLRLSCAATGRAFG

SEQ ID NO: 26 - protein, 30 aa, Artificial
  KERE-class Nanobody FW1 sequence
AVQLVESGGGLVQPGESLGLSCVASGRDFV

SEQ ID NO: 27 - protein, 30 aa, Artificial
  KERE-class Nanobody FW1 sequence
EVQLVESGGGLVQAGGSLRLSCEVLGRTAG

SEQ ID NO: 28 - protein, 30 aa, Artificial
  KERE-class Nanobody FW1 sequence
QVQLVESGGGWVQPGGSLRLSCAASETILS

SEQ ID NO: 29 - protein, 30 aa, Artificial
  KERE-class Nanobody FW1 sequence
QVQLVESGGGTVQPGGSLNLSCVASGNTFN

SEQ ID NO: 30 - protein, 30 aa, Artificial
  KERE-class Nanobody FW1 sequence
EVQLVESGGGLAQPGGSLQLSCSAPGFTLD

SEQ ID NO: 31 - protein, 30 aa, Artificial
  KERE-class Nanobody FW1 sequence
AQELEESGGGLVQAGGSLRLSCAASGRTFN

SEQ ID NO: 32 - protein, 22 aa, Artificial
  KERE-class Nanobody FW1 sequence
VESGGGLVQPGGSLRLSCAASG

SEQ ID NO: 33 - protein, 22 aa, Artificial
  KERE-class Nanobody FW1 sequence
VDSGGGLVQAGDSLKLSCALTG

SEQ ID NO: 34 - protein, 22 aa, Artificial
  KERE-class Nanobody FW1 sequence
VDSGGGLVQAGDSLRLSCAASG

SEQ ID NO: 35 - protein, 22 aa, Artificial
  KERE-class Nanobody FW1 sequence
VDSGGGLVEAGGSLRLSCQVSE

SEQ ID NO: 36 - protein, 22 aa, Artificial
  KERE-class Nanobody FW1 sequence
QDSGGGSVQAGGSLKLSCAASG

SEQ ID NO: 37 - protein, 22 aa, Artificial
  KERE-class Nanobody FW1 sequence
VQSGGRLVQAGDSLRLSCAASE

SEQ ID NO: 38 - protein, 22 aa, Artificial
  KERE-class Nanobody FW1 sequence
VESGGTLVQSGDSLKLSCASST

SEQ ID NO: 39 - protein, 22 aa, Artificial
  KERE-class Nanobody FW1 sequence
MESGGDSVQSGGSLTLSCVASG

SEQ ID NO: 40 - protein, 22 aa, Artificial
  KERE-class Nanobody FW1 sequence
QASGGGLVQAGGSLRLSCSASV

SEQ ID NO: 41 - protein, 14 aa, Artificial
  KERE-class Nanobody FW2 sequence
WFRQAPGKEREFVA

SEQ ID NO: 42 - protein, 14 aa, Artificial
  KERE-class Nanobody FW2 sequence
WFRQTPGREREFVA

SEQ ID NO: 43 - protein, 14 aa, Artificial
  KERE-class Nanobody FW2 sequence
WYRQAPGKQREMVA

SEQ ID NO: 44 - protein, 14 aa, Artificial
  KERE-class Nanobody FW2 sequence
WYRQGPGKQRELVA

SEQ ID NO: 45 - protein, 14 aa, Artificial
  KERE-class Nanobody FW2 sequence
WIRQAPGKEREGVS

SEQ ID NO: 46 - protein, 14 aa, Artificial
  KERE-class Nanobody FW2 sequence
WFREAPGKEREGIS

SEQ ID NO: 47 - protein, 14 aa, Artificial
  KERE-class Nanobody FW2 sequence
WYRQAPGKERDLVA

SEQ ID NO: 48 - protein, 14 aa, Artificial
  KERE-class Nanobody FW2 sequence
WFRQAPGKQREEVS

SEQ ID NO: 49 - protein, 14 aa, Artificial
  KERE-class Nanobody FW2 sequence
WFRQPPGKVREFVG

SEQ ID NO: 50 - protein, 32 aa, Artificial
  KERE-class Nanobody FW3 sequence
RFTISRDNAKNTVYLQMNSLKPEDTAVYRCYF

SEQ ID NO: 51 - protein, 32 aa, Artificial
  KERE-class Nanobody FW3 sequence
RFAISRDNNKNTGYLQMNSLEPEDTAVYYCAA

SEQ ID NO: 52 - protein, 32 aa, Artificial
  KERE-class Nanobody FW3 sequence
RFTVARNNAKNTVNLEMNSLKPEDTAVYYCAA

SEQ ID NO: 53 - protein, 32 aa, Artificial
  KERE-class Nanobody FW3 sequence
RFTISRDIAKNTVDLLMNNLEPEDTAVYYCAA

SEQ ID NO: 54 - protein, 32 aa, Artificial
  KERE-class Nanobody FW3 sequence
RLTISRDNAVDTMYLQMNSLKPEDTAVYYCAA

SEQ ID NO: 55 - protein, 32 aa, Artificial
  KERE-class Nanobody FW3 sequence
RFTISRDNAKNTVYLQMDNVKPEDTAIYYCAA

SEQ ID NO: 56 - protein, 32 aa, Artificial
  KERE-class Nanobody FW3 sequence
RFTISKDSGKNTVYLQMTSLKPEDTAVYYCAT

SEQ ID NO: 57 - protein, 32 aa, Artificial
  KERE-class Nanobody FW3 sequence
RFTISRDSAKNMMYLQMNNLKPQDTAVYYCAA

SEQ ID NO: 58 - protein, 32 aa, Artificial
  KERE-class Nanobody FW3 sequence
RFTISRENDKSTVYLQLNSLKPEDTAVYYCAA

SEQ ID NO: 59 - protein, 32 aa, Artificial
  KERE-class Nanobody FW3 sequence
RFTISRDYAGNTAYLQMNSLKPEDTGVYYCAT

SEQ ID NO: 60 - protein, 11 aa, Artificial
  KERE-class Nanobody FW4 sequence
WGQGTQVTVSS

SEQ ID NO: 61 - protein, 11 aa, Artificial
  KERE-class Nanobody FW4 sequence
WGKGTLVTVSS

SEQ ID NO: 62 - protein, 11 aa, Artificial
  KERE-class Nanobody FW4 sequence
RGQGTRVTVSS

SEQ ID NO: 63 - protein, 11 aa, Artificial
  KERE-class Nanobody FW4 sequence
WGLGTQVTISS

SEQ ID NO: 64 - protein, 30 aa, Artificial
  GLEW-class Nanobody FW1 sequence
QVQLVESGGGLVQPGGSLRLSCAASGFTFS

SEQ ID NO: 65 - protein, 30 aa, Artificial
  GLEW-class Nanobody FW1 sequence
EVHLVESGGGLVRPGGSLRLSCAAFGFIFK

SEQ ID NO: 66 - protein, 30 aa, Artificial
  GLEW-class Nanobody FW1 sequence
QVKLEESGGGLAQPGGSLRLSCVASGFTFS

SEQ ID NO: 67 - protein, 30 aa, Artificial
  GLEW-class Nanobody FW1 sequence
EVQLVESGGGLVQPGGSLRLSCVCVSSGCT

SEQ ID NO: 68 - protein, 30 aa, Artificial
  GLEW-class Nanobody FW1 sequence
EVQLVESGGGLALPGGSLTLSCVFSGSTFS

SEQ ID NO: 69 - protein, 22 aa, Artificial
  GLEW-class Nanobody FW1 sequence
VESGGGLVQPGGSLRLSCAASG

SEQ ID NO: 70 - protein, 22 aa, Artificial
  GLEW-class Nanobody FW1 sequence
EESGGGLAQPGGSLRLSCVASG

SEQ ID NO: 71 - protein, 22 aa, Artificial
  GLEW-class Nanobody FW1 sequence
VESGGGLALPGGSLTLSCVFSG

SEQ ID NO: 72 - protein, 14 aa, Artificial
  GLEW-class Nanobody FW2 sequence
WVRQAPGKVLEWVS

SEQ ID NO: 73 - protein, 14 aa, Artificial
  GLEW-class Nanobody FW2 sequence
WVRRPPGKGLEWVS

SEQ ID NO: 74 - protein, 14 aa, Artificial
  GLEW-class Nanobody FW2 sequence
WVRQAPGMGLEWVS

SEQ ID NO: 75 - protein, 14 aa, Artificial
  GLEW-class Nanobody FW2 sequence
WVRQAPGKEPEWVS

SEQ ID NO: 76 - protein, 14 aa, Artificial
  GLEW-class Nanobody FW2 sequence
WVRQAPGKDQEWVS

SEQ ID NO: 77 - protein, 14 aa, Artificial
  GLEW-class Nanobody FW2 sequence
WVRQAPGKAEEWVS

SEQ ID NO: 78 - protein, 14 aa, Artificial
  GLEW-class Nanobody FW2 sequence
WVRQAPGKGLEWVA

SEQ ID NO: 79 - protein, 14 aa, Artificial
  GLEW-class Nanobody FW2 sequence
WVRQAPGRATEWVS

SEQ ID NO: 80 - protein, 32 aa, Artificial
  GLEW-class Nanobody FW3 sequence
RFTISRDNAKNTLYLQMNSLKPEDTAVYYCVK

SEQ ID NO: 81 - protein, 32 aa, Artificial
  GLEW-class Nanobody FW3 sequence
RFTISRDNARNTLYLQMDSLIPEDTALYYCAR

SEQ ID NO: 82 - protein, 32 aa, Artificial
  GLEW-class Nanobody FW3 sequence
RFTSSRDNAKSTLYLQMNDLKPEDTALYYCAR

SEQ ID NO: 83 - protein, 32 aa, Artificial
  GLEW-class Nanobody FW3 sequence
RFIISRDNAKNTLYLQMNSLGPEDTAMYYCQR

SEQ ID NO: 84 - protein, 32 aa, Artificial
  GLEW-class Nanobody FW3 sequence
RFTASRDNAKNTLYLQMNSLKSEDTARYYCAR

SEQ ID NO: 85 - protein, 32 aa, Artificial
  GLEW-class Nanobody FW3 sequence
RFTISRDNAKNTLYLQMDDLQSEDTAMYYCGR

SEQ ID NO: 86 - protein, 11 aa, Artificial
  GLEW-class Nanobody FW4 sequence
GSQGTQVTVSS

SEQ ID NO: 87 - protein, 11 aa, Artificial
  GLEW-class Nanobody FW4 sequence
LRGGTQVTVSS

SEQ ID NO: 88 - protein, 11 aa, Artificial
  GLEW-class Nanobody FW4 sequence
RGQGTLVTVSS

SEQ ID NO: 89 - protein, 11 aa, Artificial
  GLEW-class Nanobody FW4 sequence
RSRGIQVTVSS

SEQ ID NO: 90 - protein, 11 aa, Artificial
  GLEW-class Nanobody FW4 sequence
WGKGTQVTVSS

SEQ ID NO: 91 - protein, 11 aa, Artificial
  GLEW-class Nanobody FW4 sequence
WGQGTQVTVSS

SEQ ID NO: 92 - protein, 30 aa, Artificial
  P,R,S 103-class Nanobody FW1 sequence
AVQLVESGGGLVQAGGSLRLSCAASGRTFS

SEQ ID NO: 93 - protein, 30 aa, Artificial
  P,R,S 103-class Nanobody FW1 sequence
QVQLQESGGGMVQPGGSLRLSCAASGFDFG

SEQ ID NO: 94 - protein, 30 aa, Artificial; identical to SEQ ID NO: 65
  P,R,S 103-class Nanobody FW1 sequence

SEQ ID NO: 95 - protein, 30 aa, Artificial
  P,R,S 103-class Nanobody FW1 sequence
QVQLAESGGGLVQPGGSLKLSCAASRTIVS

SEQ ID NO: 96 - protein, 30 aa, Artificial
  P,R,S 103-class Nanobody FW1 sequence
QEHLVESGGGLVDIGGSLRLSCAASERIFS

SEQ ID NO: 97 - protein, 30 aa, Artificial; identical to SEQ ID NO: 66
  P,R,S 103-class Nanobody FW1 sequence

SEQ ID NO: 98 - protein, 30 aa, Artificial; identical to SEQ ID NO: 67
  P,R,S 103-class Nanobody FW1 sequence

SEQ ID NO: 99 - protein, 30 aa, Artificial; identical to SEQ ID NO: 68
  P,R,S 103-class Nanobody FW1 sequence

SEQ ID NO: 100 - protein, 22 aa, Artificial
  P,R,S 103-class Nanobody FW1 sequence
VESGGGLVQAGGSLRLSCAASG

SEQ ID NO: 101 - protein, 22 aa, Artificial
  P,R,S 103-class Nanobody FW1 sequence
AESGGGLVQPGGSLKLSCAASR

SEQ ID NO: 102 - protein, 14 aa, Artificial
  P,R,S 103-class Nanobody FW2 sequence
WFRQAPGKEREFVA

SEQ ID NO: 103 - protein, 14 aa, Artificial
  P,R,S 103-class Nanobody FW2 sequence
WVRQAPGKVLEWVS

SEQ ID NO: 104 - protein, 14 aa, Artificial
  P,R,S 103-class Nanobody FW2 sequence
WVRRPPGKGLEWVS

SEQ ID NO: 105 - protein, 14 aa, Artificial
  P,R,S 103-class Nanobody FW2 sequence
WIRQAPGKEREGVS

SEQ ID NO: 106 - protein, 14 aa, Artificial
  P,R,S 103-class Nanobody FW2 sequence
WVRQYPGKEPEWVS

SEQ ID NO: 107 - protein, 14 aa, Artificial
  P,R,S 103-class Nanobody FW2 sequence
WFRQPPGKEHEFVA

SEQ ID NO: 108 - protein, 14 aa, Artificial
  P,R,S 103-class Nanobody FW2 sequence
WYRQAPGKRTELVA

SEQ ID NO: 109 - protein, 14 aa, Artificial
  P,R,S 103-class Nanobody FW2 sequence
WLRQAPGQGLEWVS

SEQ ID NO: 110 - protein, 14 aa, Artificial
  P,R,S 103-class Nanobody FW2 sequence
WLRQTPGKGLEWVG

SEQ ID NO: 111 - protein, 14 aa, Artificial
  P,R,S 103-class Nanobody FW2 sequence
WVRQAPGKAEEFVS

SEQ ID NO: 112 - protein, 32 aa, Artificial
  P,R,S 103-class Nanobody FW3 sequence
RFTISRDNAKNTVYLQMNSLKPEDTAVYYCAA

SEQ ID NO: 113 - protein, 32 aa, Artificial; identical to SEQ ID NO: 81
  P,R,S 103-class Nanobody FW3 sequence

SEQ ID NO: 114 - protein, 32 aa, Artificial
  P,R,S 103-class Nanobody FW3 sequence
RFTISRDNAKNEMYLQMNNLKTEDTGVYWCGA

SEQ ID NO: 115 - protein, 32 aa, Artificial
  P,R,S 103-class Nanobody FW3 sequence
RFTISSDSNRNMIYLQMNNLKPEDTAVYYCAA

SEQ ID NO: 116 - protein, 32 aa, Artificial
  P,R,S 103-class Nanobody FW3 sequence
RFTISRDNAKNMLYLHLNNLKSEDTAVYYCRR

SEQ ID NO: 117 - protein, 32 aa, Artificial
  P,R,S 103-class Nanobody FW3 sequence
RFTISRDNAKKTVYLRLNSLNPEDTAVYSCNL

SEQ ID NO: 118 - protein, 32 aa, Artificial
  P,R,S 103-class Nanobody FW3 sequence
RFKISRDNAKKTLYLQMNSLGPEDTAMYYCQR

SEQ ID NO: 119 - protein, 32 aa, Artificial
  P,R,S 103-class Nanobody FW3 sequence
RFTVSRDNGKNTAYLRMNSLKPEDTADYYCAV

SEQ ID NO: 120 - protein, 11 aa, Artificial
  P,R,S 103-class Nanobody FW4 sequence
RGQGTQVTVSS

SEQ ID NO: 121 - protein, 11 aa, Artificial
  P,R,S 103-class Nanobody FW4 sequence
LRGGTQVTVSS

SEQ ID NO: 122 - protein, 11 aa, Artificial
  P,R,S 103-class Nanobody FW4 sequence
GNKGTLVTVSS

SEQ ID NO: 123 - protein, 11 aa, Artificial
  P,R,S 103-class Nanobody FW4 sequence
SSPGTQVTVSS

SEQ ID NO: 124 - protein, 11 aa, Artificial
  P,R,S 103-class Nanobody FW4 sequence
SSQGTLVTVSS

SEQ ID NO: 125 - protein, 11 aa, Artificial
  P,R,S 103-class Nanobody FW4 sequence
RSRGIQVTVSS

SEQ ID NO: 126 - protein, 30 aa, Artificial
  Nanobody or Nanobody fragment
EVQLVESGGGLVQPGGSLRLSCAASGFTLD

SEQ ID NO: 127 - protein, 30 aa, Artificial; identical to SEQ ID NO: 126
  Nanobody or Nanobody fragment

SEQ ID NO: 128 - protein, 30 aa, Artificial
  Nanobody or Nanobody fragment
  misc_feature (1)..(1): Xaa can be any naturally occurring amino acid
XVQLVESGGGLVQPGGSLRLSCAASGFTLD

SEQ ID NO: 129 - protein, 30 aa, Artificial; identical to SEQ ID NO: 126
  Nanobody or Nanobody fragment

SEQ ID NO: 130 - protein, 30 aa, Artificial; identical to SEQ ID NO: 126
  Nanobody or Nanobody fragment

SEQ ID NO: 131 - protein, 30 aa, Artificial
  Nanobody or Nanobody fragment
EVQLVESGGGLVQAGGSLRLSCAASGFTAD

SEQ ID NO: 132 - protein, 30 aa, Artificial
  Nanobody or Nanobody fragment
EVQLVESGGGLVQPGGSLRLSCAASGFTFD

SEQ ID NO: 133 - protein, 30 aa, Artificial
  Nanobody or Nanobody fragment
EVQLVESGGGLVQAGGSLRLSCAASGFTFD

SEQ ID NO: 134 - protein, 30 aa, Artificial; identical to SEQ ID NO: 133
  Nanobody or Nanobody fragment

SEQ ID NO: 135 - protein, 30 aa, Artificial
  Nanobody or Nanobody fragment
  misc_feature (13)..(13): Xaa can be any naturally occurring amino acid
  misc_feature (24)..(24): Xaa can be any naturally occurring amino acid
  misc_feature (28)..(28): Xaa can be any naturally occurring amino acid
EVQLVESGGGLVXAGGSLRLSCAXSGFXFD

SEQ ID NO: 136 - protein, 30 aa, Artificial
  Nanobody or Nanobody fragment
  misc_feature (1)..(1): Xaa can be any naturally occurring amino acid
XVQLVESGGGLVQAGGSLRLSCAASGFTFD

SEQ ID NO: 137 - protein, 30 aa, Artificial
  Nanobody or Nanobody fragment
EVQLVESGGGLVRAGGSLRLSCTASGNILN

SEQ ID NO: 138 - protein, 30 aa, Artificial; identical to SEQ ID NO: 137
  Nanobody or Nanobody fragment

SEQ ID NO: 139 - protein, 30 aa, Artificial
  Nanobody or Nanobody fragment
EVQLVESGGGLVQAGGSLRLSCAASGSGFN

SEQ ID NO: 140 - protein, 30 aa, Artificial
  Nanobody or Nanobody fragment
  misc_feature (3)..(3): Xaa can be any naturally occurring amino acid
EVXLVESGGGLVQAGGSLRLSCAASGSGFN

SEQ ID NO: 141 - protein, 30 aa, Artificial
  Nanobody or Nanobody fragment
EVQLVESGGGLVQPGGSLRLSCAASGFAFS

SEQ ID NO: 142 - protein, 30 aa, Artificial
  Nanobody or Nanobody fragment
KVQLVESGGGLVQPGGSLRLSCAASGFAFS

SEQ ID NO: 143 - protein, 30 aa, Artificial; identical to SEQ ID NO: 141
  Nanobody or Nanobody fragment

SEQ ID NO: 144 - protein, 30 aa, Artificial
  Nanobody or Nanobody fragment
EVQLVESGGGLVQAGGSLRLSCAASGFTLD

SEQ ID NO: 145 - protein, 30 aa, Artificial
  Nanobody or Nanobody fragment
  misc_feature (3)..(3): Xaa can be any naturally occurring amino acid
EVXLVESGGGLVQAGGSLRLSCAASGFTLD

SEQ ID NO: 146 - protein, 30 aa, Artificial
  Nanobody or Nanobody fragment
EVQLVESGGGLVQAGGSLTLSCALSGGSSS

SEQ ID NO: 147 - protein, 30 aa, Artificial; identical to SEQ ID NO: 146
  Nanobody or Nanobody fragment

SEQ ID NO: 148 - protein, 30 aa, Artificial
  Nanobody or Nanobody fragment
EVQPVESGGGLVQAGGSLTLSCALSGGSSS

SEQ ID NO: 149 - protein, 30 aa, Artificial; identical to SEQ ID NO: 133
  Nanobody or Nanobody fragment

SEQ ID NO: 150 - protein, 30 aa, Artificial
  Nanobody or Nanobody fragment
EVQLVESGGGLVQSGGSLRLSCAASGSIVG

SEQ ID NO: 151 - protein, 30 aa, Artificial
  Nanobody or Nanobody fragment
KVQLVESGGGLVQAGGSLRLTCAASGSILS

SEQ ID NO: 152 - protein, 30 aa, Artificial
  Nanobody or Nanobody fragment
EVQLVESGGGLVQPGGSLRLSCTASGSVFS

SEQ ID NO: 153 - protein, 30 aa, Artificial
  Nanobody or Nanobody fragment
EVQLVESGGGLVQPGGSLRLYCAAPGTMYS

SEQ ID NO: 154 - protein, 30 aa, Artificial; identical to SEQ ID NO: 136
  Nanobody or Nanobody fragment
  misc_feature (1)..(1): Xaa can be any naturally occurring amino acid

SEQ ID NO: 155 - protein, 30 aa, Artificial
  Nanobody or Nanobody fragment
EVQLVESGGGLVQAGGSLRLSCTVSGSTGS

SEQ ID NO: 156 - protein, 30 aa, Artificial
  Nanobody or Nanobody fragment
EVQLVESGGGVVQAGGSLRLSCTVSGSTGS

SEQ ID NO: 157 - protein, 30 aa, Artificial
  Nanobody or Nanobody fragment
EVQLVESGRGLVQAGGSLRLSCTVSGSTGS

SEQ ID NO: 158 - protein, 30 aa, Artificial; identical to SEQ ID NO: 155
  Nanobody or Nanobody fragment

SEQ ID NO: 159 - protein, 30 aa, Artificial; identical to SEQ ID NO: 155
  Nanobody or Nanobody fragment

SEQ ID NO: 160 - protein, 30 aa, Artificial; identical to SEQ ID NO: 155
  Nanobody or Nanobody fragment

SEQ ID NO: 161 - protein, 30 aa, Artificial
  Nanobody or Nanobody fragment
EVQLVESGGELVQAGGSLRLSCAASGSVSS

SEQ ID NO: 162 - protein, 30 aa, Artificial
  Nanobody or Nanobody fragment
EMQLVESGGELVQAGGSLRLSCAASGSVSS

SEQ ID NO: 163 - protein, 30 aa, Artificial; identical to SEQ ID NO: 161
  Nanobody or Nanobody fragment

SEQ ID NO: 164 - protein, 31 aa, Artificial
  Nanobody or Nanobody fragment
AEVQLVESGGELVQAGGSLRLSCAAPGSVSS

SEQ ID NO: 165 - protein, 30 aa, Artificial
  Nanobody or Nanobody fragment
EVQLVESGGGLVQAGRSLRLSCAASGSVSS

SEQ ID NO: 166 - protein, 30 aa, Artificial
  Nanobody or Nanobody fragment
EVQLVESGGGLVQAGGSLRLSCAASGSVSS

SEQ ID NO: 167 - protein, 30 aa, Artificial; identical to SEQ ID NO: 166
  Nanobody or Nanobody fragment

SEQ ID NO: 168 - protein, 30 aa, Artificial
  Nanobody or Nanobody fragment
  misc_feature (1)..(1): Xaa can be any naturally occurring amino acid
  misc_feature (25)..(25): Xaa can be any naturally occurring amino acid
XVQLVESGGGLVQAGGSLRLSCAAXGSVSS

SEQ ID NO: 169 - protein, 30 aa, Artificial; identical to SEQ ID NO: 166
  Nanobody or Nanobody fragment

SEQ ID NO: 170 - protein, 30 aa, Artificial
  Nanobody or Nanobody fragment
EVQLVESGGGLVQAGGSLRLSCATSGSVSS

SEQ ID NO: 171 - protein, 30 aa, Artificial; identical to SEQ ID NO: 166
  Nanobody or Nanobody fragment

SEQ ID NO: 172 - protein, 30 aa, Artificial
  Nanobody or Nanobody fragment
EVQLVESGGGLVQAGGSLRLSCAASGSVSA

SEQ ID NO: 173 - protein, 30 aa, Artificial
  Nanobody or Nanobody fragment
  misc_feature (3)..(3): Xaa can be any naturally occurring amino acid
EVXLVESGGGLVQAGGSLRLSCAASGSISS

SEQ ID NO: 174 - protein, 30 aa, Artificial
  Nanobody or Nanobody fragment
  misc_feature (3)..(3): Xaa can be any naturally occurring amino acid
EVXLVESGGGLVQAGRSLRLSCAASGSVSS

SEQ ID NO: 175 - protein, 30 aa, Artificial
  Nanobody or Nanobody fragment
  misc_feature (1)..(1): Xaa can be any naturally occurring amino acid
XVQLVESGGGLVQAGGSLRLSCAASGSVSA

SEQ ID NO: 176 - protein, 30 aa, Artificial
  Nanobody or Nanobody fragment
EVQLVESGGGLVQAGGSLRLSCAASGSRFR

SEQ ID NO: 177 - protein, 30 aa, Artificial
  Nanobody or Nanobody fragment
EVQLVESGGGLVQAGGSLRLSCAASGSRLR

SEQ ID NO: 178 - protein, 30 aa, Artificial
  Nanobody or Nanobody fragment
  misc_feature (1)..(1): Xaa can be any naturally occurring amino acid
XVQLVESGGGLVQAGGSLRLSCAASGSRLR

SEQ ID NO: 179 - protein, 30 aa, Artificial
  Nanobody or Nanobody fragment
EVQLVESGGGVVEAGGSLRLSCAATGSRFR

SEQ ID NO: 180 - protein, 30 aa, Artificial; identical to SEQ ID NO: 176
  Nanobody or Nanobody fragment

SEQ ID NO: 181 - protein, 30 aa, Artificial
  Nanobody or Nanobody fragment
EMQLVESGGGLVQAGGSLRLSCAASGSRLR

SEQ ID NO: 182 - protein, 30 aa, Artificial
  Nanobody or Nanobody fragment
  misc_feature (1)..(1): Xaa can be any naturally occurring amino acid
XVQLVESGGGLVQAGGSLRLSCAASGSRFR

SEQ ID NO: 183 - protein, 30 aa, Artificial
  Nanobody or Nanobody fragment
KVQLVESGGGLVQAGGSLRLSCAASGSRFR

SEQ ID NO: 184 - protein, 30 aa, Artificial; identical to SEQ ID NO: 176
  Nanobody or Nanobody fragment

SEQ ID NO: 185 - protein, 30 aa, Artificial
  Nanobody or Nanobody fragment
EVQLVESGGGLVQVGGSLRLSCAASGSRFR

SEQ ID NO: 186 - protein, 30 aa, Artificial; identical to SEQ ID NO: 177
  Nanobody or Nanobody fragment

SEQ ID NO: 187 - protein, 30 aa, Artificial
  Nanobody or Nanobody fragment
EVQLVESRGGLVQAGGSLRLSCAASGSRLR

SEQ ID NO: 188 - protein, 30 aa, Artificial; identical to SEQ ID NO: 176
  Nanobody or Nanobody fragment

SEQ ID NO: 189 - protein, 30 aa, Artificial
  Nanobody or Nanobody fragment
EVQLVESGGGLVRAGGSLRLSCAASGSRFR

SEQ ID NO: 190 - protein, 30 aa, Artificial
  Nanobody or Nanobody fragment
  misc_feature (10)..(10): Xaa can be any naturally occurring amino acid
  misc_feature (22)..(22): Xaa can be any naturally occurring amino acid
EVQLVESGGXLVQAEGSLRLSXAASGSRFR

SEQ ID NO: 191 - protein, 30 aa, Artificial; identical to SEQ ID NO: 176
  Nanobody or Nanobody fragment

SEQ ID NO: 192 - protein, 30 aa, Artificial
  Nanobody or Nanobody fragment
EVQLVESGGGLVQAGGSVRLSCAASGVIFR

SEQ ID NO: 193 - protein, 30 aa, Artificial
  Nanobody or Nanobody fragment
  misc_feature (3)..(3): Xaa can be any naturally occurring amino acid
KVXLVESGGGLVQAGGSVRLSCAASGVIFR

SEQ ID NO: 194 - protein, 29 aa, Artificial
  Nanobody or Nanobody fragment
EVQLVESGGGLVQAGGSQKLSCAASGSTL

SEQ ID NO: 195 - protein, 29 aa, Artificial
  Nanobody or Nanobody fragment
EVQLVESGGGLVQAGGSLRLSCAASGSTE

SEQ ID NO: 196 - protein, 29 aa, Artificial
  Nanobody or Nanobody fragment
EVQLVESGGGLVQAGGSQKLSCAASGSTL

SEQ ID NO: 197 - protein, 30 aa, Artificial
  Nanobody or Nanobody fragment
EVQLVESGGGLVQAGGSLRLSCAASGNTFS

SEQ ID NO: 198 - protein, 30 aa, Artificial; identical to SEQ ID NO: 197
  Nanobody or Nanobody fragment

SEQ ID NO: 199 - protein, 30 aa, Artificial
  Nanobody or Nanobody fragment
EVQLVESGGGLVQTGGSLRLSCAASGSIFM

SEQ ID NO: 200 - protein, 30 aa, Artificial
  Nanobody or Nanobody fragment
EVQLVESGGGLVQPGGSLRLSCAASGSILS

SEQ ID NO: 201 - protein, 30 aa, Artificial
  Nanobody or Nanobody fragment
EVQLVESGGGLVQAGGSLRLSCAPSSSAVS

SEQ ID NO: 202 - protein, 30 aa, Artificial
  Nanobody or Nanobody fragment
EVQLVESGGGLVQAGGSLRLSCAASASILS

SEQ ID NO: 203 - protein, 30 aa, Artificial
  Nanobody or Nanobody fragment
EVQLVESGGGLVQTGGSLRLSCAASGSTFN

SEQ ID NO: 204 - protein, 30 aa, Artificial
  Nanobody or Nanobody fragment
EVQLVESGGGKVQAGMSQRLSCAASGGIGT

SEQ ID NO: 205 - protein, 30 aa, Artificial
  Nanobody or Nanobody fragment
EVQLVESGGGLVQAGGSLRLSCAASGSIFS

SEQ ID NO: 206 - protein, 30 aa, Artificial
  Nanobody or Nanobody fragment
  misc_feature (1)..(1): Xaa can be any naturally occurring amino acid
XVQLVESGGGLVQAGGSLRLSCAATGTIFS

SEQ ID NO: 207 - protein, 30 aa, Artificial; identical to SEQ ID NO: 205
  Nanobody or Nanobody fragment

SEQ ID NO: 208 - protein, 30 aa, Artificial
  Nanobody or Nanobody fragment
EVQLVESGGGLVQAGGSLKLSCVASGLILS

SEQ ID NO: 209 - protein, 30 aa, Artificial
  Nanobody or Nanobody fragment
EVQLVESGGGLVQAGGSLRLSCAASGIIFS

SEQ ID NO: 210 - protein, 30 aa, Artificial
  Nanobody or Nanobody fragment
EVQLVESGGGLVQPGGSLRLSCAASRIIFS

SEQ ID NO: 211 - protein, 30 aa, Artificial
  Nanobody or Nanobody fragment
EVQLVESGGGLVQPGGSLRLSCAASRSIFS

SEQ ID NO: 212 - protein, 29 aa, Artificial
  Nanobody or Nanobody fragment
KVQLVESGGGLVQAGGSLRLSCTASGNIA

SEQ ID NO: 213 - protein, 30 aa, Artificial
  Nanobody or Nanobody fragment
EVQLVESGGGLVQAGGSLRLSCTASGSDVR

SEQ ID NO: 214 - protein, 30 aa, Artificial
  Nanobody or Nanobody fragment
EVQLVESGGGLVQAGGSLRLSCVASGFIFS

SEQ ID NO: 215 - protein, 30 aa, Artificial
  Nanobody or Nanobody fragment
EVQLVASGGGLVQTGGSLRLSCAASGSGFS

SEQ ID NO: 216 - protein, 30 aa, Artificial
  Nanobody or Nanobody fragment
EVQLVESGGGLVQAGGSLRLSCAASGIIFT

SEQ ID NO: 217 - protein, 30 aa, Artificial
  Nanobody or Nanobody fragment
EVQLVESGGGLVQPGGSLRLSCAASGSIRS

SEQ ID NO: 218 - protein, 30 aa, Artificial
  Nanobody or Nanobody fragment
EVQLVQSGGGLVQAGGSLRLSCAASGYIFS

SEQ ID NO: 219 - protein, 30 aa, Artificial
  Nanobody or Nanobody fragment
EVQLVESGGGSVQAGGSLRLSCAASQRTFS

SEQ ID NO: 220 - protein, 30 aa, Artificial
  Nanobody or Nanobody fragment
EVPLVESGGGSVQAGGSLRLSCAASQRTFS

SEQ ID NO: 221 - protein, 30 aa, Artificial
  Nanobody or Nanobody fragment
  misc_feature (13)..(13): Xaa can be any naturally occurring amino acid
EVQLVESGGGSVXAGGSLRLSCAASQRTFS

SEQ ID NO: 222 - protein, 30 aa, Artificial; identical to SEQ ID NO: 219
  Nanobody or Nanobody fragment

SEQ ID NO: 223 - protein, 30 aa, Artificial
  Nanobody or Nanobody fragment
  misc_feature (1)..(1): Xaa can be any naturally occurring amino acid
XVQLVESGGGSVQAGGSLRLSCAASQRTFS

SEQ ID NO: 224 - protein, 30 aa, Artificial
  Nanobody or Nanobody fragment
EVQLVESGGGSVQAGGSLRLSCATSQRTFS

SEQ ID NO: 225 - protein, 30 aa, Artificial
  Nanobody or Nanobody fragment
EVQLVESGVGLVQAGGSLRLSCAASGYTFN

SEQ ID NO: 226 - protein, 30 aa, Artificial
  Nanobody or Nanobody fragment
EVQLVESGGGLVQAGGSLRLSCAASGYTFN

SEQ ID NO: 227 - protein, 30 aa, Artificial
  Nanobody or Nanobody fragment
EVQLVESGGGLVQAGESLKLSCVASGNILR

SEQ ID NO: 228 - protein, 30 aa, Artificial
  Nanobody or Nanobody fragment
EVQLVESGGGLVQAGGSLRLSCAASGRIYS

SEQ ID NO: 229 - protein, 30 aa, Artificial
  Nanobody or Nanobody fragment
EVQLVESGGGSVQAGGSLRLSCTASGSIFS

SEQ ID NO: 230 - protein, 30 aa, Artificial
  Nanobody or Nanobody fragment
EVQLVESGGGLVQPGGSLRLSCAASGFTFS

SEQ ID NO: 231 - protein, 30 aa, Artificial
  Nanobody or Nanobody fragment
EVQLVESGGGLVQAGGSLRLSCAASGSTYR

SEQ ID NO: 232 - protein, 30 aa, Artificial
  Nanobody or Nanobody fragment
EVQLVESGGGLVQAGGSLRLSCAASISANA

SEQ ID NO: 233 - protein, 30 aa, Artificial
  Nanobody or Nanobody fragment
  misc_feature (19)..(19): Xaa can be any naturally occurring amino acid
EVQLVESGGGLVQAGGSLXLSCAASGFTFD

SEQ ID NO: 234 - protein, 30 aa, Artificial
  Nanobody or Nanobody fragment
  misc_feature (5)..(5): Xaa can be any naturally occurring amino acid
  misc_feature (19)..(19): Xaa can be any naturally occurring amino acid
  misc_feature (22)..(22): Xaa can be any naturally occurring amino acid
EVQLXESGGGLVQAGGSLXLSXAASGYIFS

SEQ ID NO: 235 - protein, 30 aa, Artificial
  Nanobody or Nanobody fragment
EVQLVESGGGLVEAGGSLRLSCATSGSTFG

SEQ ID NO: 236 - protein, 30 aa, Artificial
  Nanobody or Nanobody fragment
EVQLVESGGGSVQAGGSLRLSCAASGTTAT

SEQ ID NO: 237 - protein, 30 aa, Artificial
  Nanobody or Nanobody fragment
EVQLVESGGGLVQAGGSLRLSCAASGRTIS

SEQ ID NO: 238 - protein, 30 aa, Artificial; identical to SEQ ID NO: 237
  Nanobody or Nanobody fragment

SEQ ID NO: 239 - protein, 30 aa, Artificial; identical to SEQ ID NO: 237
  Nanobody or Nanobody fragment

SEQ ID NO: 240 - protein, 30 aa, Artificial; identical to SEQ ID NO: 237
  Nanobody or Nanobody fragment

SEQ ID NO: 241 - protein, 30 aa, Artificial; identical to SEQ ID NO: 237
  Nanobody or Nanobody fragment

SEQ ID NO: 242 - protein, 30 aa, Artificial; identical to SEQ ID NO: 237
  Nanobody or Nanobody fragment

SEQ ID NO: 243 - protein, 30 aa, Artificial
  Nanobody or Nanobody fragment
EVQLVESGGGLVQAGDSLRLSCAASGRTIS

SEQ ID NO: 244 - protein, 30 aa, Artificial; identical to SEQ ID NO: 237
  Nanobody or Nanobody fragment

SEQ ID NO: 245 - protein, 30 aa, Artificial
  Nanobody or Nanobody fragment
EVQLVESGGGLVPAGGSLRLSCAASGRAIS

SEQ ID NO: 246 - protein, 30 aa, Artificial; identical to SEQ ID NO: 237
  Nanobody or Nanobody fragment

SEQ ID NO: 247 - protein, 30 aa, Artificial; identical to SEQ ID NO: 237
  Nanobody or Nanobody fragment

SEQ ID NO: 248 - protein, 30 aa, Artificial
  Nanobody or Nanobody fragment
  misc_feature (1)..(1): Xaa can be any naturally occurring amino acid
XVQLVESGGGLVQAGGSLRLSCAASGRTIS

SEQ ID NO: 249 - protein, 30 aa, Artificial; identical to SEQ ID NO: 237
  Nanobody or Nanobody fragment

SEQ ID NO: 250 - protein, 30 aa, Artificial; identical to SEQ ID NO: 248
  Nanobody or Nanobody fragment
  misc_feature (1)..(1): Xaa can be any naturally occurring amino acid

SEQ ID NO: 251 - protein, 30 aa, Artificial; identical to SEQ ID NO: 237
  Nanobody or Nanobody fragment

SEQ ID NO: 252 - protein, 30 aa, Artificial
  Nanobody or Nanobody fragment
  misc_feature (3)..(3): Xaa can be any naturally occurring amino acid
EVXLVESGGGLVQAGGSLRLSCAASGRTIS

SEQ ID NO: 253 - protein, 30 aa, Artificial; identical to SEQ ID NO: 252
  Nanobody or Nanobody fragment
  misc_feature (3)..(3): Xaa can be any naturally occurring amino acid

SEQ ID NO: 254 - protein, 33 aa, Artificial
  Nanobody or Nanobody fragment
EVQLVESGGGLVQAGGSLSLSCAASGASGIIYS

SEQ ID NO: 255 - protein, 33 aa, Artificial
  Nanobody or Nanobody fragment
EVQLVESGGGLVQAGGSLRLSCAASGASGTIYS

SEQ ID NO: 256 - protein, 30 aa, Artificial
  Nanobody or Nanobody fragment
EVQLVESGGGLVQPGGSLRLSCAVSGFTSD

SEQ ID NO: 257 - protein, 33 aa, Artificial
  Nanobody or Nanobody fragment
EVQLVESGGGLVQAGGSLRLSCAASGSISSINS

SEQ ID NO: 258 - protein, 28 aa, Artificial
  Nanobody or Nanobody fragment
EVQLVESGGGLVQAGGSLRLACQASRAI

SEQ ID NO: 259 - protein, 30 aa, Artificial
  Nanobody or Nanobody fragment
EVQLVESGGGMVQTGGSLRLSCAASGSTLN

SEQ ID NO: 260 - protein, 30 aa, Artificial
  Nanobody or Nanobody fragment
EVQLVESGGGLVQAGGSLRLSCTASGRTAS

SEQ ID NO: 261 - protein, 30 aa, Artificial
  Nanobody or Nanobody fragment
EVQLVESGGGLVQAGGSLRLSCAASGGTFS

SEQ ID NO: 262 - protein, 30 aa, Artificial
  Nanobody or Nanobody fragment
EVQLVESGGGLVQPGGSLRLSCAASGSISI

SEQ ID NO: 263 - protein, 30 aa, Artificial
  Nanobody or Nanobody fragment
EVQLVESGGGLVQPGGSLRLSCAAPGSISI

SEQ ID NO: 264 - protein, 30 aa, Artificial
  Nanobody or Nanobody fragment
EVPLVESGGGLVQPGGSLRLSCAASGSISI

SEQ ID NO: 265 - protein, 30 aa, Artificial
  Nanobody or Nanobody fragment
EVRLVESGGGLVQPGGSLRLSCAASGSISI

SEQ ID NO: 266 - protein, 30 aa, Artificial; identical to SEQ ID NO: 230
  Nanobody or Nanobody fragment

SEQ ID NO: 267 - protein, 30 aa, Artificial; identical to SEQ ID NO: 230
  Nanobody or Nanobody fragment

SEQ ID NO: 268 - protein, 30 aa, Artificial
  Nanobody or Nanobody fragment
EVQLVESGGGLVKAGGSLRLSCAASGSIFS

SEQ ID NO: 269 - protein, 30 aa, Artificial
  Nanobody or Nanobody fragment
EVQLVESGGGLVEAGGSLRLSCAASGSIFS

SEQ ID NO: 270 - protein, 30 aa, Artificial; identical to SEQ ID NO: 269
  Nanobody or Nanobody fragment

SEQ ID NO: 271 - protein, 30 aa, Artificial
  Nanobody or Nanobody fragment
EVQLVESGGGLVQAGGSLQLSCATSGESFS

SEQ ID NO: 272 - protein, 30 aa, Artificial
  Nanobody or Nanobody fragment
EVQLVESGGGLVQAGGSLRLSCTTSGRSFS

SEQ ID NO: 273 - protein, 30 aa, Artificial
  Nanobody or Nanobody fragment
EVQLVESGGALVQAGGSLRLSCAASGFAFS

SEQ ID NO: 274 - protein, 30 aa, Artificial
  Nanobody or Nanobody fragment
  misc_feature (28)..(28): Xaa can be any naturally occurring amino acid
EVQLVESGGALVQAGGSLRLSCAASGFXFS

SEQ ID NO: 275 - protein, 30 aa, Artificial
  Nanobody or Nanobody fragment
  misc_feature (1)..(1): Xaa can be any naturally occurring amino acid
XVQLVESGGGLVQPGGSLRLSCAASGFAFS

SEQ ID NO: 276 - protein, 30 aa, Artificial; identical to SEQ ID NO: 141
  Nanobody or Nanobody fragment

SEQ ID NO: 277 - protein, 30 aa, Artificial
  Nanobody or Nanobody fragment
EVQLVESGGGLVQAGGSPRLSCVASGRTFS

SEQ ID NO: 278 - protein, 30 aa, Artificial
  Nanobody or Nanobody fragment
EVQLVESGGGLVQAGGSLTLSCAASGSVFS

SEQ ID NO: 279 - protein, 30 aa, Artificial
  Nanobody or Nanobody fragment
EVQLVESGGGLVQAGGSLRLSCAASGRMFS

SEQ ID NO: 280 - protein, 30 aa, Artificial
  Nanobody or Nanobody fragment
EVQLVESGGGLVQAGGSLNLSCAASGRILR

SEQ ID NO: 281 - protein, 30 aa, Artificial
  Nanobody or Nanobody fragment
EVQLVESGGGLVQAGGSLRLSCGASGSIGT

SEQ ID NO: 282 - protein, 30 aa, Artificial
  Nanobody or Nanobody fragment
EVQLVESGGGLVQAGGSLKLSCAASGFTFD

SEQ ID NO: 283 - protein, 30 aa, Artificial
  Nanobody or Nanobody fragment
EVQLVESGGALVQPGGSLRLSCAASGFAFS

SEQ ID NO: 284 - protein, 30 aa, Artificial
  Nanobody or Nanobody fragment
EVQLVESGGGLVQAGGSLRLSCAASGGTFR

SEQ ID NO: 285 - protein, 30 aa, Artificial
  Nanobody or Nanobody fragment
EVQLVESGGGLVQAGGSLRLSCTVSITTYS

SEQ ID NO: 286 - protein, 30 aa, Artificial
  Nanobody or Nanobody fragment
EVQLVDSGGRLVQPGDLLRLSCTTSGFASS

SEQ ID NO: 287 - protein, 30 aa, Artificial
  Nanobody or Nanobody fragment
EVQLVESRGGLVQAGGSLRLSCTASERTFS

SEQ ID NO: 288 - protein, 30 aa, Artificial; identical to SEQ ID NO: 132
  Nanobody or Nanobody fragment

SEQ ID NO: 289 - protein, 30 aa, Artificial
  Nanobody or Nanobody fragment
EVQLVESGGGLVQAGGSLRLSCAASGSISS

SEQ ID NO: 290 - protein, 30 aa, Artificial
  Nanobody or Nanobody fragment
EVQLVESGGGLVQAGGSLRLSCVASGBTIC

SEQ ID NO: 291 - protein, 30 aa, Artificial
  Nanobody or Nanobody fragment
EVQLVESGGGLVQAGGSLTLSCAASGNISS

SEQ ID NO: 292 - protein, 30 aa, Artificial
  Nanobody or Nanobody fragment
EVQLVESGGGLVQPGGSLRLSCAASGITLN

SEQ ID NO: 293 - protein, 30 aa, Artificial; identical to SEQ ID NO: 133
  Nanobody or Nanobody fragment

SEQ ID NO: 294 - protein, 30 aa, Artificial; identical to SEQ ID NO: 291
  Nanobody or Nanobody fragment

SEQ ID NO: 295 - protein, 30 aa, Artificial
  Nanobody or Nanobody fragment
QVQLQDSGGGLVQAGGSLRLSCEASGRTFS

SEQ ID NO: 296 - protein, 5 aa, Artificial
  Nanobody or Nanobody fragment
YYNIG

SEQ ID NO: 297 - protein, 5 aa, Artificial
  Nanobody or Nanobody fragment
YYNIG

SEQ ID NO: 298 - protein, 5 aa, Artificial
  Nanobody or Nanobody fragment
YYAIG

SEQ ID NO: 299 - protein, 5 aa, Artificial
  Nanobody or Nanobody fragment
YYNIG

SEQ ID NO: 300 - protein, 5 aa, Artificial
  Nanobody or Nanobody fragment
SYNIG

SEQ ID NO: 301 - protein, 5 aa, Artificial
  Nanobody or Nanobody fragment
DYAIG

SEQ ID NO: 302 - protein, 5 aa, Artificial
  Nanobody or Nanobody fragment
DYAIG

SEQ ID NO: 303 - protein, 5 aa, Artificial
  Nanobody or Nanobody fragment
DYAIG

SEQ ID NO: 304 - protein, 5 aa, Artificial
  Nanobody or Nanobody fragment
DYAIG

SEQ ID NO: 305 - protein, 5 aa, Artificial
  Nanobody or Nanobody fragment
DYAIG

SEQ ID NO: 306 - protein, 5 aa, Artificial
  Nanobody or Nanobody fragment
DYVIG

SEQ ID NO: 307 - protein, 5 aa, Artificial
  Nanobody or Nanobody fragment
IASMG

SEQ ID NO: 308 - protein, 5 aa, Artificial
  Nanobody or Nanobody fragment
IASMG

SEQ ID NO: 309 - protein, 5 aa, Artificial
  Nanobody or Nanobody fragment
IVNAG

SEQ ID NO: 310 - protein, 5 aa, Artificial
  Nanobody or Nanobody fragment
IVNAG

SEQ ID NO: 311 - protein, 5 aa, Artificial
  Nanobody or Nanobody fragment
SYAMS

SEQ ID NO: 312 - protein, 5 aa, Artificial
  Nanobody or Nanobody fragment
SYVMT

SEQ ID NO: 313 - protein, 5 aa, Artificial
  Nanobody or Nanobody fragment
SYVMT

SEQ ID NO: 314 - protein, 5 aa, Artificial
  Nanobody or Nanobody fragment
AYAIG

SEQ ID NO: 315 - protein, 5 aa, Artificial
  Nanobody or Nanobody fragment
AYAIG

SEQ ID NO: 316 - protein, 5 aa, Artificial
  Nanobody or Nanobody fragment
IANSA

SEQ ID NO: 317 - protein, 5 aa, Artificial
  Nanobody or Nanobody fragment
IANSA

SEQ ID NO: 318 - protein, 5 aa, Artificial
  Nanobody or Nanobody fragment
IANSA

SEQ ID NO: 319 - protein, 5 aa, Artificial
  Nanobody or Nanobody fragment
DYAIG

SEQ ID NO: 320 - protein, 5 aa, Artificial
  Nanobody or Nanobody fragment
ISDMR

SEQ ID NO: 321 - protein, 5 aa, Artificial
  Nanobody or Nanobody fragment
VSTMT

SEQ ID NO: 322 - protein, 5 aa, Artificial
  Nanobody or Nanobody fragment
IGNMG

SEQ ID NO: 323 - protein, 5 aa, Artificial
  Nanobody or Nanobody fragment
FIEMG

SEQ ID NO: 324 - protein, 5 aa, Artificial
  Nanobody or Nanobody fragment
DYAIG

SEQ ID NO: 325 - protein, 5 aa, Artificial
  Nanobody or Nanobody fragment
INAMG

SEQ ID NO: 326 - protein, 5 aa, Artificial
  Nanobody or Nanobody fragment
INAMG

SEQ ID NO: 327 - protein, 5 aa, Artificial
  Nanobody or Nanobody fragment
INAMG

SEQ ID NO: 328 - protein, 5 aa, Artificial
  Nanobody or Nanobody fragment
INVMG

SEQ ID NO: 329 - protein, 5 aa, Artificial
  Nanobody or Nanobody fragment
INAMG

SEQ ID NO: 330 - protein, 5 aa, Artificial
  Nanobody or Nanobody fragment
INAMG

SEQ ID NO: 331 - protein, 5 aa, Artificial
  Nanobody or Nanobody fragment
INVMG

SEQ ID NO: 332 - protein, 5 aa, Artificial
  Nanobody or Nanobody fragment
INVMG

SEQ ID NO: 333 - protein, 5 aa, Artificial
  Nanobody or Nanobody fragment
INVMG

SEQ ID NO: 334 - protein, 5 aa, Artificial
  Nanobody or Nanobody fragment
INVMG

SEQ ID NO: 335 - protein, 5 aa, Artificial
  Nanobody or Nanobody fragment
INVMA

SEQ ID NO: 336 - protein, 5 aa, Artificial
  Nanobody or Nanobody fragment
INVMG

SEQ ID NO: 337 - protein, 5 aa, Artificial
  Nanobody or Nanobody fragment
INVMA

SEQ ID NO: 338 - protein, 5 aa, Artificial
  Nanobody or Nanobody fragment
INVMG

SEQ ID NO: 339 - protein, 5 aa, Artificial
  Nanobody or Nanobody fragment
INVMA

SEQ ID NO: 340 - protein, 5 aa, Artificial
  Nanobody or Nanobody fragment
INVMA

SEQ ID NO: 341 - protein, 5 aa, Artificial
  Nanobody or Nanobody fragment
INVMA

SEQ ID NO: 342 - protein, 5 aa, Artificial
  Nanobody or Nanobody fragment
INVMA

SEQ ID NO: 343 - protein, 5 aa, Artificial
  Nanobody or Nanobody fragment
INLMG

SEQ ID NO: 344 - protein, 5 aa, Artificial
  Nanobody or Nanobody fragment
INVMA

SEQ ID NO: 345 - protein, 5 aa, Artificial
  Nanobody or Nanobody fragment
INVMA

SEQ ID NO: 346 - protein, 5 aa, Artificial
  Nanobody or Nanobody fragment
FELMG

SEQ ID NO: 347 - protein, 5 aa, Artificial
  Nanobody or Nanobody fragment
FELMG

SEQ ID NO: 348 - protein, 5 aa, Artificial
  Nanobody or Nanobody fragment
FELMG

SEQ ID NO: 349 - protein, 5 aa, Artificial
  Nanobody or Nanobody fragment
FEIMG

SEQ ID NO: 350 - protein, 5 aa, Artificial
  Nanobody or Nanobody fragment
FEIMG

SEQ ID NO: 351 - protein, 5 aa, Artificial
  Nanobody or Nanobody fragment
FELMG

SEQ ID NO: 352 - protein, 5 aa, Artificial
  Nanobody or Nanobody fragment
FEIMG

SEQ ID NO: 353 - protein, 5 aa, Artificial
  Nanobody or Nanobody fragment
FELMG

SEQ ID NO: 354 - protein, 5 aa, Artificial
  Nanobody or Nanobody fragment
FELMG

SEQ ID NO: 355 - protein, 5 aa, Artificial
  Nanobody or Nanobody fragment
FELMG

SEQ ID NO: 356 - protein, 5 aa, Artificial
  Nanobody or Nanobody fragment
FELMG

SEQ ID NO: 357 - protein, 5 aa, Artificial
  Nanobody or Nanobody fragment
FELMG

SEQ ID NO: 358 - protein, 5 aa, Artificial
  Nanobody or Nanobody fragment
FELMG

SEQ ID NO: 359 - protein, 5 aa, Artificial
  Nanobody or Nanobody fragment
FEIMG

SEQ ID NO: 360 - protein, 5 aa, Artificial
  Nanobody or Nanobody fragment
FELMG

SEQ ID NO: 361 - protein, 5 aa, Artificial
  Nanobody or Nanobody fragment
FEIMG

SEQ ID NO: 362 - protein, 5 aa, Artificial
  Nanobody or Nanobody fragment
FVLMG

SEQ ID NO: 363 - protein, 5 aa, Artificial
  Nanobody or Nanobody fragment
FVLMG

SEQ ID NO: 364 - protein, 5 aa, Artificial
  Nanobody or Nanobody fragment
IYTMG

SEQ ID NO: 365 - protein, 5 aa, Artificial
  Nanobody or Nanobody fragment
IYTMG

SEQ ID NO: 366 - protein, 5 aa, Artificial
  Nanobody or Nanobody fragment
IYTMG

SEQ ID NO: 367 - protein, 5 aa, Artificial
  Nanobody or Nanobody fragment
INAVG

SEQ ID NO: 368 - protein, 5 aa, Artificial
  Nanobody or Nanobody fragment
INAVG

SEQ ID NO: 369 - protein, 5 aa, Artificial
  Nanobody or Nanobody fragment
ILAMG

SEQ ID NO: 370 - protein, 5 aa, Artificial
  Nanobody or Nanobody fragment
RTDVD

SEQ ID NO: 371 - protein, 5 aa, Artificial
  Nanobody or Nanobody fragment
IVHIQ

SEQ ID NO: 372 - protein, 5 aa, Artificial
  Nanobody or Nanobody fragment
INTMD

SEQ ID NO: 373 - protein, 5 aa, Artificial
  Nanobody or Nanobody fragment
INAWG

SEQ ID NO: 374 - protein, 5 aa, Artificial
  Nanobody or Nanobody fragment
FSSVA

SEQ ID NO: 375 - protein, 5 aa, Artificial
  Nanobody or Nanobody fragment
INYMG

SEQ ID NO: 376 - protein, 5 aa, Artificial
  Nanobody or Nanobody fragment
SNYMG

SEQ ID NO: 377 - protein, 5 aa, Artificial
  Nanobody or Nanobody fragment
ISYMG

SEQ ID NO: 378 - protein, 5 aa, Artificial
  Nanobody or Nanobody fragment
IHTMG

SEQ ID NO: 379 - protein, 5 aa, Artificial
  Nanobody or Nanobody fragment
IYTMG

SEQ ID NO: 380 - protein, 5 aa, Artificial
  Nanobody or Nanobody fragment
RNVMA

SEQ ID NO: 381 - protein, 5 aa, Artificial
  Nanobody or Nanobody fragment
RNAMA

SEQ ID NO: 382 - protein, 6 aa, Artificial
  Nanobody or Nanobody fragment
RITAFG

SEQ ID NO: 383 - protein, 5 aa, Artificial
  Nanobody or Nanobody fragment
ITAFA

SEQ ID NO: 384 - protein, 5 aa, Artificial
  Nanobody or Nanobody fragment
IYGMA

SEQ ID NO: 385 - protein, 5 aa, Artificial
  Nanobody or Nanobody fragment
IDGMN

SEQ ID NO: 386 - protein, 5 aa, Artificial
  Nanobody or Nanobody fragment
IYTMA

SEQ ID NO: 387 - protein, 5 aa, Artificial
  Nanobody or Nanobody fragment
IDAMA

SEQ ID NO: 388 - protein, 5 aa, Artificial
  Nanobody or Nanobody fragment
SNITG

SEQ ID NO: 389 - protein, 5 aa, Artificial
  Nanobody or Nanobody fragment
SDVMG

SEQ ID NO: 390 - protein, 5 aa, Artificial
  Nanobody or Nanobody fragment
RDVTG

SEQ ID NO: 391 - protein, 5 aa, Artificial
  Nanobody or Nanobody fragment
SDVMG

SEQ ID NO: 392 - protein, 5 aa, Artificial
  Nanobody or Nanobody fragment
RDVMG

SEQ ID NO: 393 - protein, 5 aa, Artificial
  Nanobody or Nanobody fragment
SDVMG

SEQ ID NO: 394 - protein, 5 aa, Artificial
  Nanobody or Nanobody fragment
SDVMG

SEQ ID NO: 395 - protein, 5 aa, Artificial
  Nanobody or Nanobody fragment
HNTMA

SEQ ID NO: 396 - protein, 5 aa, Artificial
  Nanobody or Nanobody fragment
HNTMA

SEQ ID NO: 397 - protein, 5 aa, Artificial
  Nanobody or Nanobody fragment
VTSMG

SEQ ID NO: 398 - protein, 5 aa, Artificial
  Nanobody or Nanobody fragment
SNTMA

SEQ ID NO: 399 - protein, 5 aa, Artificial
  Nanobody or Nanobody fragment
INDMG

SEQ ID NO: 400 - protein, 5 aa, Artificial
  Nanobody or Nanobody fragment
RMAMG

SEQ ID NO: 401 - protein, 5 aa, Artificial
  Nanobody or Nanobody fragment
LNNMA

SEQ ID NO: 402 - protein, 5 aa, Artificial
  Nanobody or Nanobody fragment
IDVVS

SEQ ID NO: 403 - protein, 5 aa, Artificial
  Nanobody or Nanobody fragment
DYAIG

SEQ ID NO: 404 - protein, 5 aa, Artificial
  Nanobody or Nanobody fragment
SNITG

SEQ ID NO: 405 - protein, 5 aa, Artificial
  Nanobody or Nanobody fragment
IEAMA

SEQ ID NO: 406 - protein, 5 aa, Artificial
  Nanobody or Nanobody fragment
ITVPG

SEQ ID NO: 407 - protein, 5 aa, Artificial
  Nanobody or Nanobody fragment
RFTMG

SEQ ID NO: 408 - protein, 5 aa, Artificial
  Nanobody or Nanobody fragment
RFTMG

SEQ ID NO: 409 - protein, 5 aa, Artificial
  Nanobody or Nanobody fragment
RFTMG

SEQ ID NO: 410 - protein, 5 aa, Artificial
  Nanobody or Nanobody fragment
RFTMG

SEQ ID NO: 411 - protein, 5 aa, Artificial
  Nanobody or Nanobody fragment
RFTMG

SEQ ID NO: 412 - protein, 5 aa, Artificial
  Nanobody or Nanobody fragment
RFTMG

SEQ ID NO: 413 - protein, 5 aa, Artificial
  Nanobody or Nanobody fragment
RFTMG

SEQ ID NO: 414 - protein, 5 aa, Artificial
  Nanobody or Nanobody fragment
RFTMG

SEQ ID NO: 415 - protein, 5 aa, Artificial
  Nanobody or Nanobody fragment
RFTMG

SEQ ID NO: 416 - protein, 5 aa, Artificial
  Nanobody or Nanobody fragment
RFTMG

SEQ ID NO: 417 - protein, 5 aa, Artificial
  Nanobody or Nanobody fragment
RFTMG

SEQ ID NO: 418 - protein, 5 aa, Artificial
  Nanobody or Nanobody fragment
RFTMG

SEQ ID NO: 419 - protein, 5 aa, Artificial
  Nanobody or Nanobody fragment
RFTMG

SEQ ID NO: 420 - protein, 5 aa, Artificial
  Nanobody or Nanobody fragment
RFTMG

SEQ ID NO: 421 - protein, 5 aa, Artificial
  Nanobody or Nanobody fragment
RFTMG

SEQ ID NO: 422 - protein, 5 aa, Artificial
  Nanobody or Nanobody fragment
RFTMG

SEQ ID NO: 423 - protein, 5 aa, Artificial
  Nanobody or Nanobody fragment
RFTMG

SEQ ID NO: 424 - protein, 5 aa, Artificial
  Nanobody or Nanobody fragment
INAMG

SEQ ID NO: 425 - protein, 5 aa, Artificial
  Nanobody or Nanobody fragment
ISSMG

SEQ ID NO: 426 - protein, 5 aa, Artificial
  Nanobody or Nanobody fragment
YYAIG

SEQ ID NO: 427 - protein, 5 aa, Artificial
  Nanobody or Nanobody fragment
INIMG

SEQ ID NO: 428 - protein, 5 aa, Artificial
  Nanobody or Nanobody fragment
ERIVG

SEQ ID NO: 429 - protein, 5 aa, Artificial
  Nanobody or Nanobody fragment
INNGE

SEQ ID NO: 430 - protein, 5 aa, Artificial
  Nanobody or Nanobody fragment
TYAMG

SEQ ID NO: 431 - protein, 5 aa, Artificial
  Nanobody or Nanobody fragment
TYAMG

SEQ ID NO: 432 - protein, 5 aa, Artificial
  Nanobody or Nanobody fragment
INFMN

SEQ ID NO: 433 - protein, 5 aa, Artificial
  Nanobody or Nanobody fragment
INFMN

SEQ ID NO: 434 - protein, 5 aa, Artificial
  Nanobody or Nanobody fragment
INFMN

SEQ ID NO: 435 - protein, 5 aa, Artificial
  Nanobody or Nanobody fragment
INFMN

SEQ ID NO: 436 - protein, 5 aa, Artificial
  Nanobody or Nanobody fragment
RYTMT

SEQ ID NO: 437 - protein, 5 aa, Artificial
  Nanobody or Nanobody fragment
RYTMT

SEQ ID NO: 438 - protein, 5 aa, Artificial
  Nanobody or Nanobody fragment
INTMA

SEQ ID NO: 439 - protein, 5 aa, Artificial
  Nanobody or Nanobody fragment
INVMG

SEQ ID NO: 440 - protein, 5 aa, Artificial
  Nanobody or Nanobody fragment
INVMG

SEQ ID NO: 441 - protein, 5 aa, Artificial
  Nanobody or Nanobody fragment
IKAMG

SEQ ID NO: 442 - protein, 5 aa, Artificial
  Nanobody or Nanobody fragment
IKAMG

SEQ ID NO: 443 - protein, 5 aa, Artificial
  Nanobody or Nanobody fragment
INTMA

SEQ ID NO: 444 - protein, 5 aa, Artificial
  Nanobody or Nanobody fragment
INTMA

SEQ ID NO: 445 - protein, 5 aa, Artificial
  Nanobody or Nanobody fragment
NYPMG

SEQ ID NO: 446 - protein, 5 aa, Artificial
  Nanobody or Nanobody fragment
HYPMG

SEQ ID NO: 447 - protein, 5 aa, Artificial
  Nanobody or Nanobody fragment
RCAMG

SEQ ID NO: 448 - protein, 5 aa, Artificial
  Nanobody or Nanobody fragment
INAMG

SEQ ID NO: 449 - protein, 5 aa, Artificial
  Nanobody or Nanobody fragment
PNVMG

SEQ ID NO: 450 - protein, 5 aa, Artificial
  Nanobody or Nanobody fragment
INNMG

SEQ ID NO: 451 - protein, 5 aa, Artificial
  Nanobody or Nanobody fragment
FNIMG

SEQ ID NO: 452 - protein, 5 aa, Artificial
  Nanobody or Nanobody fragment
DYAIG

SEQ ID NO: 453 - protein, 5 aa, Artificial
  Nanobody or Nanobody fragment
NTVMS

SEQ ID NO: 454 - protein, 5 aa, Artificial
  Nanobody or Nanobody fragment
YQNMG

SEQ ID NO: 455 - protein, 5 aa, Artificial
  Nanobody or Nanobody fragment
FKRVA

SEQ ID NO: 456 - protein, 5 aa, Artificial
  Nanobody or Nanobody fragment
GYVLG

SEQ ID NO: 457 - protein, 5 aa, Artificial
  Nanobody or Nanobody fragment
RNVMA

SEQ ID NO: 458 - protein, 5 aa, Artificial
  Nanobody or Nanobody fragment
DYDIG

SEQ ID NO: 459 - protein, 5 aa, Artificial
  Nanobody or Nanobody fragment
LGLVQ

SEQ ID NO: 460 - protein, 5 aa, Artificial
  Nanobody or Nanobody fragment
IRAMD

SEQ ID NO: 461 - protein, 5 aa, Artificial
  Nanobody or Nanobody fragment
INIVN

SEQ ID NO: 462 - protein, 5 aa, Artificial
  Nanobody or Nanobody fragment
YYAIG

SEQ ID NO: 463 - protein, 5 aa, Artificial
  Nanobody or Nanobody fragment
DYAIG

SEQ ID NO: 464 - protein, 5 aa, Artificial
  Nanobody or Nanobody fragment
INIVN

SEQ ID NO: 465 - protein, 5 aa, Artificial
  Nanobody or Nanobody fragment
SYAMG

SEQ ID NO: 466 - protein, 14 aa, Artificial
  Nanobody or Nanobody fragment
WFRQAPGEEREGVS

SEQ ID NO: 467 - protein, 14 aa, Artificial
  Nanobody or Nanobody fragment
WFRQAPGKEREGVS

SEQ ID NO: 468 - protein, 14 aa, Artificial
  Nanobody or Nanobody fragment
WFRQAPGKEREGVS

SEQ ID NO: 469 - protein, 14 aa, Artificial
  Nanobody or Nanobody fragment
WFRQAPGKEREGVS

SEQ ID NO: 470 - protein, 14 aa, Artificial
  Nanobody or Nanobody fragment
WFRQAPGEEREGVS

SEQ ID NO: 471 - protein, 14 aa, Artificial
  Nanobody or Nanobody fragment
WFRQAPGKEREGVS

SEQ ID NO: 472 - protein, 14 aa, Artificial
  Nanobody or Nanobody fragment
WFRQAPGKEREGVS

SEQ ID NO: 473 - protein, 14 aa, Artificial
  Nanobody or Nanobody fragment
WFRQAPGKEREGVS

SEQ ID NO: 474 - protein, 14 aa, Artificial
  Nanobody or Nanobody fragment
WFRQAPGKEREGVS

SEQ ID NO: 475 - protein, 14 aa, Artificial
  Nanobody or Nanobody fragment
WFRQAPGEEREGVS

SEQ ID NO: 476 - protein, 14 aa, Artificial
  Nanobody or Nanobody fragment
  misc_feature (3)..(3): Xaa can be any naturally occurring amino acid
WFXQAPGKEREGVS

SEQ ID NO: 477 - protein, 14 aa, Artificial
  Nanobody or Nanobody fragment
WYRQAPGKQRTWVA

SEQ ID NO: 478 - protein, 14 aa, Artificial
  Nanobody or Nanobody fragment
WYRQALGKQRTWVA

SEQ ID NO: 479 - protein, 14 aa, Artificial
  Nanobody or Nanobody fragment
WYRQGPEKQRELVA

SEQ ID NO: 480 - protein, 14 aa, Artificial
  Nanobody or Nanobody fragment
WYRQGPGKQREFVA

SEQ ID NO: 481 - protein, 14 aa, Artificial
  Nanobody or Nanobody fragment
WVRQAPGKGVEWVS

SEQ ID NO: 482 - protein, 14 aa, Artificial
  Nanobody or Nanobody fragment
WVRQAPGKGLEWVS

SEQ ID NO: 483 - protein, 14 aa, Artificial
  Nanobody or Nanobody fragment
WVRQAPGKGLEWVS

SEQ ID NO: 484 - protein, 14 aa, Artificial
  Nanobody or Nanobody fragment
WFRQAPGKEREGVS

SEQ ID NO: 485 - protein, 14 aa, Artificial
  Nanobody or Nanobody fragment
WFRQAPGKEREGVS

SEQ ID NO: 486 - protein, 14 aa, Artificial
  Nanobody or Nanobody fragment
WYRQAPGNQRELVA

SEQ ID NO: 487 - protein, 14 aa, Artificial
  Nanobody or Nanobody fragment
WYRQAPGNQRELVA

SEQ ID NO: 488 - protein, 14 aa, Artificial
  Nanobody or Nanobody fragment
WYRQAPGNQRELVA

SEQ ID NO: 489 - protein, 14 aa, Artificial
  Nanobody or Nanobody fragment
WFRQAPGKEREGVS

SEQ ID NO: 490 - protein, 14 aa, Artificial
  Nanobody or Nanobody fragment
WYRQAPGNQRELAA

SEQ ID NO: 491 - protein, 14 aa, Artificial
  Nanobody or Nanobody fragment
WYRQVLGTQRELVA

SEQ ID NO: 492 - protein, 14 aa, Artificial
  Nanobody or Nanobody fragment
WYRQAPGKQRELVA

SEQ ID NO: 493 - protein, 14 aa, Artificial
  Nanobody or Nanobody fragment
WYRQAPGKQRELVA

SEQ ID NO: 494 - protein, 14 aa, Artificial
  Nanobody or Nanobody fragment
WFRQAPGKEREGVS

SEQ ID NO: 495 - protein, 14 aa, Artificial
  Nanobody or Nanobody fragment
WYRQAPGKQRELVA

SEQ ID NO: 496 - protein, 14 aa, Artificial
  Nanobody or Nanobody fragment
WYRQAPGKQRELVA

SEQ ID NO: 497 - protein, 14 aa, Artificial
  Nanobody or Nanobody fragment
WYRQAPGKQRELVA

SEQ ID NO: 498 - protein, 14 aa, Artificial
  Nanobody or Nanobody fragment
WYRQAPGKQRELVA

SEQ ID NO: 499 - protein, 14 aa, Artificial
  Nanobody or Nanobody fragment
  misc_feature (9)..(9): Xaa can be any naturally occurring amino acid
WYRQAPGRXRELVA

SEQ ID NO: 500 - protein, 14 aa, Artificial
  Nanobody or Nanobody fragment
WYRQAPGKQRELVA

SEQ ID NO: 501 - protein, 14 aa, Artificial
  Nanobody or Nanobody fragment
WYRQAPGKQRELVA

SEQ ID NO: 502 - protein, 14 aa, Artificial
  Nanobody or Nanobody fragment
WYRQAPGKQRELVA

SEQ ID NO: 503 - protein, 14 aa, Artificial
  Nanobody or Nanobody fragment
WYRQAPGKQRELVA

SEQ ID NO: 504 - protein, 14 aa, Artificial
  Nanobody or Nanobody fragment
WYRQAPGKQRELVA

SEQ ID NO: 505 - protein, 14 aa, Artificial
  Nanobody or Nanobody fragment
WYRQAPGKQRELVA

SEQ ID NO: 506 - protein, 14 aa, Artificial
  Nanobody or Nanobody fragment
WYRQAPGKQRELVA

SEQ ID NO: 507 - protein, 14 aa, Artificial
  Nanobody or Nanobody fragment
WYRQAPGKERELVA

SEQ ID NO: 508 - protein, 14 aa, Artificial
  Nanobody or Nanobody fragment
WYRQAPGKQRELVA

SEQ ID NO: 509 - protein, 14 aa, Artificial
  Nanobody or Nanobody fragment
WYRQAPGKQRELVA

SEQ ID NO: 510 - protein, 14 aa, Artificial
  Nanobody or Nanobody fragment
WYRQAPGKQRELVA

SEQ ID NO: 511 - protein, 14 aa, Artificial
  Nanobody or Nanobody fragment
WYRQAPGKQRELVA

SEQ ID NO: 512 - protein, 14 aa, Artificial
  Nanobody or Nanobody fragment
WYRQAPGKQRELVA

SEQ ID NO: 513 - protein, 14 aa, Artificial
  Nanobody or Nanobody fragment
WYRQAPGKQRELVA

SEQ ID NO: 514 - protein, 14 aa, Artificial
  Nanobody or Nanobody fragment
WYRQAPGKQRELVA

SEQ ID NO: 515 - protein, 14 aa, Artificial
  Nanobody or Nanobody fragment
WYRQAPGKQRELVA

SEQ ID NO: 516 - protein, 14 aa, Artificial
  Nanobody or Nanobody fragment
WYRQAPGKPRDLVA

SEQ ID NO: 517 - protein, 14 aa, Artificial
  Nanobody or Nanobody fragment
WYRQAPGKPRDLVA

SEQ ID NO: 518 - protein, 14 aa, Artificial
  Nanobody or Nanobody fragment
WYRQAPGKPRDLVA

SEQ ID NO: 519 - protein, 14 aa, Artificial
  Nanobody or Nanobody fragment
WYRQAPGKPRDLVA

SEQ ID NO: 520 - protein, 14 aa, Artificial
  Nanobody or Nanobody fragment
WYRQAPGKPRDLVA

SEQ ID NO: 521 - protein, 14 aa, Artificial
  Nanobody or Nanobody fragment
WYRQAPGKPRDLVA

SEQ ID NO: 522 - protein, 14 aa, Artificial
  Nanobody or Nanobody fragment
WYRQAPGKPRDLVA

SEQ ID NO: 523 - protein, 14 aa, Artificial
  Nanobody or Nanobody fragment
WYRQAPGKPRDLVA

SEQ ID NO: 524 - protein, 14 aa, Artificial
  Nanobody or Nanobody fragment
WYRQAPGKPRDLVA

SEQ ID NO: 525 - protein, 14 aa, Artificial
  Nanobody or Nanobody fragment
WYRQAPGKPRDLVA

SEQ ID NO: 526 - protein, 14 aa, Artificial
  Nanobody or Nanobody fragment
WYRQAPGKPRDLVA

SEQ ID NO: 527 - protein, 14 aa, Artificial
  Nanobody or Nanobody fragment
WYRQAPGKPRDLVA

SEQ ID NO: 528 - protein, 14 aa, Artificial
  Nanobody or Nanobody fragment
WYRQAPGKPRDLVA

SEQ ID NO: 529 - protein, 14 aa, Artificial
  Nanobody or Nanobody fragment
WYRQAPGSARDLVA

SEQ ID NO: 530 - protein, 14 aa, Artificial
  Nanobody or Nanobody fragment
  misc_feature (4)..(4): Xaa can be any naturally occurring amino acid
WYRXAPGKPRDLVA

SEQ ID NO: 531 - protein, 14 aa, Artificial
  Nanobody or Nanobody fragment
WYRQAPGRMRDLVA

SEQ ID NO: 532 - protein, 14 aa, Artificial
  Nanobody or Nanobody fragment
WYRQAPGKQRELVA

SEQ ID NO: 533 - protein, 14 aa, Artificial
  Nanobody or Nanobody fragment
  misc_feature (4)..(4): Xaa can be any naturally occurring amino acid
WYRXAPGKQRELVA

SEQ ID NO: 534 - protein, 14 aa, Artificial
  Nanobody or Nanobody fragment
WYRQALGKKRVFVA

SEQ ID NO: 535 - protein, 14 aa, Artificial
  Nanobody or Nanobody fragment
WYRQAPGKQRVFVA

SEQ ID NO: 536 - protein, 14 aa, Artificial
  Nanobody or Nanobody fragment
WYRQALGKKRVFVA

SEQ ID NO: 537 - protein, 14 aa, Artificial
  Nanobody or Nanobody fragment
WYRQAPEKQRELVA

SEQ ID NO: 538 - protein, 14 aa, Artificial
  Nanobody or Nanobody fragment
WYRQAPEKQRELVA

SEQ ID NO: 539 - protein, 14 aa, Artificial
  Nanobody or Nanobody fragment
WYRQAPGKQRELVT

SEQ ID NO: 540 - protein, 14 aa, Artificial
  Nanobody or Nanobody fragment
WYRQAPGKGREWVA

SEQ ID NO: 541 - protein, 14 aa, Artificial
  Nanobody or Nanobody fragment
WHRQAPGKQRELVA

SEQ ID NO: 542 - protein, 14 aa, Artificial
  Nanobody or Nanobody fragment
WFRRTPGKQRELVS

SEQ ID NO: 543 - protein, 14 aa, Artificial
  Nanobody or Nanobody fragment
WYRQAPGKQRELVA

SEQ ID NO: 544 - protein, 14 aa, Artificial
  Nanobody or Nanobody fragment
WYRQAPGKQRELVA

SEQ ID NO: 545 - protein, 14 aa, Artificial
  Nanobody or Nanobody fragment
WYRQAPGKQREAVA

SEQ ID NO: 546 - protein, 14 aa, Artificial
  Nanobody or Nanobody fragment
WYRQAPGLQRESVA

SEQ ID NO: 547 - protein, 14 aa, Artificial
  Nanobody or Nanobody fragment
WYRQAPGKERESVA

SEQ ID NO: 548 - protein, 14 aa, Artificial
  Nanobody or Nanobody fragment
WYRQAPGKQREFVA

SEQ ID NO: 549 - protein, 14 aa, Artificial
  Nanobody or Nanobody fragment
WYRQAPGKQREFVA

SEQ ID NO: 550 - protein, 14 aa, Artificial
  Nanobody or Nanobody fragment
WYRQAPGKEREPVA

SEQ ID NO: 551 - protein, 14 aa, Artificial
  Nanobody or Nanobody fragment
WYRQAPGKQREPVA

SEQ ID NO: 552 - protein, 14 aa, Artificial
  Nanobody or Nanobody fragment
WYRQAPGRQRDFVA

SEQ ID NO: 553 - protein, 14 aa, Artificial
  Nanobody or Nanobody fragment
WYRQAPGKQRDFVA

SEQ ID NO: 554 - protein, 14 aa, Artificial
  Nanobody or Nanobody fragment
WYRQAPGKQRELVA

SEQ ID NO: 555 - protein, 14 aa, Artificial
  Nanobody or Nanobody fragment
WSRQAPGKGRELVG

SEQ ID NO: 556 - protein, 14 aa, Artificial
  Nanobody or Nanobody fragment
WYRQAPGKQRELVA

SEQ ID NO: 557 - protein, 14 aa, Artificial
  Nanobody or Nanobody fragment
WYRQTPGKQRDFVA

SEQ ID NO: 558 - protein, 14 aa, Artificial
  Nanobody or Nanobody fragment
WYRQAPGKQRELVA

SEQ ID NO: 559 - protein, 14 aa, Artificial
  Nanobody or Nanobody fragment
WFRQAPGKERDFVA

SEQ ID NO: 560 - protein, 14 aa, Artificial
  Nanobody or Nanobody fragment
WFRQAPGKERDFVA

SEQ ID NO: 561 - protein, 14 aa, Artificial
  Nanobody or Nanobody fragment
WFRQAPGKERDFVA

SEQ ID NO: 562 - protein, 14 aa, Artificial
  Nanobody or Nanobody fragment
WFRQAPGKERDFVA

SEQ ID NO: 563 - protein, 14 aa, Artificial
  Nanobody or Nanobody fragment
WFRQAPGKEGDFVA

SEQ ID NO: 564 - protein, 14 aa, Artificial
  Nanobody or Nanobody fragment
WFRQAPGKERDFVA

SEQ ID NO: 565 - protein, 14 aa, Artificial
  Nanobody or Nanobody fragment
WYRQAPGKQRELAA

SEQ ID NO: 566 - protein, 14 aa, Artificial
  Nanobody or Nanobody fragment
WYRQAPVKQRELAA

SEQ ID NO: 567 - protein, 14 aa, Artificial
  Nanobody or Nanobody fragment
WGRQIPGKQRKLVA

SEQ ID NO: 568 - protein, 14 aa, Artificial
  Nanobody or Nanobody fragment
WFRQAPGKEREFGS

SEQ ID NO: 569 - protein, 14 aa, Artificial
  Nanobody or Nanobody fragment
WYRQPPGEQRELVA

SEQ ID NO: 570 - protein, 14 aa, Artificial
  Nanobody or Nanobody fragment
WYRQAPGVERDFLA

SEQ ID NO: 571 - protein, 14 aa, Artificial
  Nanobody or Nanobody fragment
WYRQSPGKKRELVA

SEQ ID NO: 572 - protein, 14 aa, Artificial
  Nanobody or Nanobody fragment
WYRQAPGKPRELAA

SEQ ID NO: 573 - protein, 14 aa, Artificial
  Nanobody or Nanobody fragment
WFRQAPGKEREGVS

SEQ ID NO: 574 - protein, 14 aa, Artificial
  Nanobody or Nanobody fragment
WYRQAPGKQRELVA

SEQ ID NO: 575 - protein, 14 aa, Artificial
  Nanobody or Nanobody fragment
WYRQAPGKQRELVA

SEQ ID NO: 576 - protein, 14 aa, Artificial
  Nanobody or Nanobody fragment
WYRQAPGKQRELVA

SEQ ID NO: 577 - protein, 14 aa, Artificial
  Nanobody or Nanobody fragment
WFRQGPGKERDFVA

SEQ ID NO: 578 - protein, 14 aa, Artificial
  Nanobody or Nanobody fragment
WFRQAPGKERDFVA

SEQ ID NO: 579 - protein, 14 aa, Artificial
  Nanobody or Nanobody fragment
WFRQAPGKEREFVA

SEQ ID NO: 580 - protein, 14 aa, Artificial
  Nanobody or Nanobody fragment
WFRQAPGKERDFVA

SEQ ID NO: 581 - protein, 14 aa, Artificial
  Nanobody or Nanobody fragment
WFRQAPGKERDFVA

SEQ ID NO: 582 - protein, 14 aa, Artificial
  Nanobody or Nanobody fragment
WFRQAPGKERDFVA

SEQ ID NO: 583 - protein, 14 aa, Artificial
  Nanobody or Nanobody fragment
WFRQAPGKERDFVA

SEQ ID NO: 584 - protein, 14 aa, Artificial
  Nanobody or Nanobody fragment
WFRQAPGKERDFVA

SEQ ID NO: 585 - protein, 14 aa, Artificial
  Nanobody or Nanobody fragment
WFRQAPGKERDFVA

SEQ ID NO: 586 - protein, 14 aa, Artificial
  Nanobody or Nanobody fragment
WFRQAPGKERDFVA

SEQ ID NO: 587 - protein, 14 aa, Artificial
  Nanobody or Nanobody fragment
WFRQAPGKERDFVA

SEQ ID NO: 588 - protein, 14 aa, Artificial
  Nanobody or Nanobody fragment
WFRQAPGKERDFVA

SEQ ID NO: 589 - protein, 14 aa, Artificial
  Nanobody or Nanobody fragment
WFRQAPGKERDFVA

SEQ ID NO: 590 - protein, 14 aa, Artificial
  Nanobody or Nanobody fragment
WFRQAPGKERDFVA

SEQ ID NO: 591 - protein, 14 aa, Artificial
  Nanobody or Nanobody fragment
WFRQAPGKERDFVA

SEQ ID NO: 592 - protein, 14 aa, Artificial
  Nanobody or Nanobody fragment
WFRQAPGKERDFVA

SEQ ID NO: 593 - protein, 14 aa, Artificial
  Nanobody or Nanobody fragment
WFRQAPGKERDFVA

SEQ ID NO: 594 - protein, 14 aa, Artificial
  Nanobody or Nanobody fragment
WYRQAPGKQREVVA

SEQ ID NO: 595 - protein, 14 aa, Artificial
  Nanobody or Nanobody fragment
WYRQAPGKQREVVA

SEQ ID NO: 596 - protein, 14 aa, Artificial
  Nanobody or Nanobody fragment
WFRQAPGKEREGVS

SEQ ID NO: 597 - protein, 14 aa, Artificial
  Nanobody or Nanobody fragment
WYRQAPGKQRDLVA

SEQ ID NO: 598 - protein, 14 aa, Artificial
  Nanobody or Nanobody fragment
WYRQAPGKQRELVA

SEQ ID NO: 599 - protein, 14 aa, Artificial
  Nanobody or Nanobody fragment
WYRQAPGKQREFVA

SEQ ID NO: 600 - protein, 14 aa, Artificial
  Nanobody or Nanobody fragment
WLRQAPGKEREFVA

SEQ ID NO: 601 - protein, 14 aa, Artificial
  Nanobody or Nanobody fragment
WFRQAPGEERQFVA

SEQ ID NO: 602 - protein, 14 aa, Artificial
  Nanobody or Nanobody fragment
WYRQAPGKQRELVA

SEQ ID NO: 603 - protein, 14 aa, Artificial
  Nanobody or Nanobody fragment
WYRQAPGKQRELVA

SEQ ID NO: 604 - protein, 14 aa, Artificial
  Nanobody or Nanobody fragment
WYRQAPGKQRELVA

SEQ ID NO: 605 - protein, 14 aa, Artificial
  Nanobody or Nanobody fragment
WYRQAPGKQRELVA

SEQ ID NO: 606 - protein, 14 aa, Artificial
  Nanobody or Nanobody fragment
WVRQAPGKEPEWVS

SEQ ID NO: 607 - protein, 14 aa, Artificial
  Nanobody or Nanobody fragment
WVRQAPGKEPEWVS

SEQ ID NO: 608 - protein, 14 aa, Artificial
  Nanobody or Nanobody fragment
WYRQAPGKQREWIT

SEQ ID NO: 609 - protein, 14 aa, Artificial
  Nanobody or Nanobody fragment
WYRQAPGKQRELIG

SEQ ID NO: 610 - protein, 14 aa, Artificial
  Nanobody or Nanobody fragment
WYRQAPGKQRELIG

SEQ ID NO: 611 - protein, 14 aa, Artificial
  Nanobody or Nanobody fragment
WYRQAPGNQREMVA

SEQ ID NO: 612 - protein, 14 aa, Artificial
  Nanobody or Nanobody fragment
WYRQAPGNQRELVA

SEQ ID NO: 613 - protein, 14 aa, Artificial
  Nanobody or Nanobody fragment
WYRQAPGNERDWVA

SEQ ID NO: 614 - protein, 14 aa, Artificial
  Nanobody or Nanobody fragment
WYRQAPGKQRDWVA

SEQ ID NO: 615 - protein, 14 aa, Artificial
  Nanobody or Nanobody fragment
WVRQAPGKGLEWVS

SEQ ID NO: 616 - protein, 14 aa, Artificial
  Nanobody or Nanobody fragment
WVRQAPGKGLEWVS

SEQ ID NO: 617 - protein, 14 aa, Artificial
  Nanobody or Nanobody fragment
WFRQAPGKEREFVA

SEQ ID NO: 618 - protein, 14 aa, Artificial
  Nanobody or Nanobody fragment
WYRQAPGKQRELVA

SEQ ID NO: 619 - protein, 14 aa, Artificial
  Nanobody or Nanobody fragment
WFRQAPGDQREFVA

SEQ ID NO: 620 - protein, 14 aa, Artificial
  Nanobody or Nanobody fragment
WYRQAPGNKRDLVA

SEQ ID NO: 621 - protein, 14 aa, Artificial
  Nanobody or Nanobody fragment
WYRQAPGKQREMVA

SEQ ID NO: 622 - protein, 14 aa, Artificial
  Nanobody or Nanobody fragment
WFRQAPGKEREGVS

SEQ ID NO: 623 - protein, 14 aa, Artificial
  Nanobody or Nanobody fragment
WARQAPGKGLEWVS

SEQ ID NO: 624 - protein, 14 aa, Artificial
  Nanobody or Nanobody fragment
WYRQAPGNEREWVA

SEQ ID NO: 625 - protein, 14 aa, Artificial
  Nanobody or Nanobody fragment
WHRQAPGNERELVA

SEQ ID NO: 626 - protein, 14 aa, Artificial
  Nanobody or Nanobody fragment
WFRQAPGKEREFVA

SEQ ID NO: 627 - protein, 14 aa, Artificial
  Nanobody or Nanobody fragment
WFRQAPGKEREFVA

SEQ ID NO: 628 - protein, 14 aa, Artificial
  Nanobody or Nanobody fragment
WFRQTPGKEREGVS

SEQ ID NO: 629 - protein, 14 aa, Artificial
  Nanobody or Nanobody fragment
WHRQVSRKQRGLVA

SEQ ID NO: 630 - protein, 14 aa, Artificial
  Nanobody or Nanobody fragment
WYRQAPGKERELVA

SEQ ID NO: 631 - protein, 14 aa, Artificial
  Nanobody or Nanobody fragment
WYHQAPGKQRELVA

SEQ ID NO: 632 - protein, 14 aa, Artificial
  Nanobody or Nanobody fragment
WFRQAPGKEREGVS

SEQ ID NO: 633 - protein, 14 aa, Artificial
  Nanobody or Nanobody fragment
WFRQAPGKEREGVS

SEQ ID NO: 634 - protein, 14 aa, Artificial
  Nanobody or Nanobody fragment
WYHQAPGKQRELVA

SEQ ID NO: 635 - protein, 14 aa, Artificial
  Nanobody or Nanobody fragment
WFRQPPGKEREWVS

SEQ ID NO: 636 - protein, 17 aa, Artificial
  Nanobody or Nanobody fragment
CVSSSGGSTYYADSVKG

SEQ ID NO: 637 - protein, 17 aa, Artificial
  Nanobody or Nanobody fragment
CVSSSGGSTYYADSVKG

SEQ ID NO: 638 - protein, 17 aa, Artificial
  Nanobody or Nanobody fragment
CISSSDGSTYYADSVKG

SEQ ID NO: 639 - protein, 17 aa, Artificial
  Nanobody or Nanobody fragment
CVSDSGGSTYYADSVKG

SEQ ID NO: 640 - protein, 17 aa, Artificial
  Nanobody or Nanobody fragment
CVSSSGGSTYYADSVKG

SEQ ID NO: 641 - protein, 17 aa, Artificial
  Nanobody or Nanobody fragment
CISSSDGSTFYADSVKG

SEQ ID NO: 642 - protein, 17 aa, Artificial
  Nanobody or Nanobody fragment
CISSSDGSTFYANSVKD

SEQ ID NO: 643 - protein, 17 aa, Artificial
  Nanobody or Nanobody fragment
CISSSDGYTYYADSVKD

SEQ ID NO: 644 - protein, 17 aa, Artificial
  Nanobody or Nanobody fragment
CISSSDGYSFYANSVKG

SEQ ID NO: 645 - protein, 17 aa, Artificial
  Nanobody or Nanobody fragment
CISSSDGYTYYAHSVKD

SEQ ID NO: 646 - protein, 17 aa, Artificial
  Nanobody or Nanobody fragment
CISSSEGYTFYADSVKD

SEQ ID NO: 647 - protein, 16 aa, Artificial
  Nanobody or Nanobody fragment
RIRSDGTTSYQDAVKG

SEQ ID NO: 648 - protein, 16 aa, Artificial
  Nanobody or Nanobody fragment
RIRSDGTTSYQDAVKG

SEQ ID NO: 649 - protein, 16 aa, Artificial
  Nanobody or Nanobody fragment
RITSGGTTNYAESVKG

SEQ ID NO: 650 - protein, 16 aa, Artificial
  Nanobody or Nanobody fragment
RITSGGTTNYAESVKG

SEQ ID NO: 651 - protein, 17 aa, Artificial
  Nanobody or Nanobody fragment
AINSGGGSTSYLNSVKG

SEQ ID NO: 652 - protein, 17 aa, Artificial
  Nanobody or Nanobody fragment
SITSGGGYTSYLNSVKG

SEQ ID NO: 653 - protein, 17 aa, Artificial
  Nanobody or Nanobody fragment
SITSGGGYTSYVNSVKG

SEQ ID NO: 654 - protein, 17 aa, Artificial
  Nanobody or Nanobody fragment
CISSSDGSTFYADSVKD

SEQ ID NO: 655 - protein, 17 aa, Artificial
  Nanobody or Nanobody fragment
CISSSDGSRFYADSVKD

SEQ ID NO: 656 - protein, 16 aa, Artificial
  Nanobody or Nanobody fragment
RITSNDNTYYADSVKG

SEQ ID NO: 657 - protein, 16 aa, Artificial
  Nanobody or Nanobody fragment
RITSNDNTYYADSVKG

SEQ ID NO: 658 - protein, 16 aa, Artificial
  Nanobody or Nanobody fragment
RITSNDNTYYADSVKG

SEQ ID NO: 659 - protein, 17 aa, Artificial
  Nanobody or Nanobody fragment
CISSSHGSTFYADSVKD

SEQ ID NO: 660 - protein, 16 aa, Artificial
  Nanobody or Nanobody fragment
SISRGGSTNYGDFVKG

SEQ ID NO: 661 - protein, 16 aa, Artificial
  Nanobody or Nanobody fragment
SITRSGGSNYADPVKG

SEQ ID NO: 662 - protein, 16 aa, Artificial
  Nanobody or Nanobody fragment
TITQAGSPNYSQSAKG

SEQ ID NO: 663 - protein, 16 aa, Artificial
  Nanobody or Nanobody fragment
HITSGGSTKYADSVKG

SEQ ID NO: 664 - protein, 17 aa, Artificial
  Nanobody or Nanobody fragment
CISRSAGSKYYADSVKD

SEQ ID NO: 665 - protein, 16 aa, Artificial
  Nanobody or Nanobody fragment
IIYSSGRIDYADSVKG

SEQ ID NO: 666 - protein, 16 aa, Artificial
  Nanobody or Nanobody fragment
IIYSSGTIBYADSVKG

SEQ ID NO: 667 - protein, 16 aa, Artificial
  Nanobody or Nanobody fragment
IIYSSGRIDYADSVKG

SEQ ID NO: 668 - protein, 16 aa, Artificial
  Nanobody or Nanobody fragment
IIYSSGTLDYADSVKG

SEQ ID NO: 669 - protein, 16 aa, Artificial
  Nanobody or Nanobody fragment
IIYSSGRIDYADSVKG

SEQ ID NO: 670 - protein, 16 aa, Artificial
  Nanobody or Nanobody fragment
IIYSSGRIDYADSVKG

SEQ ID NO: 671 - protein, 16 aa, Artificial
  Nanobody or Nanobody fragment
TISSSGYTDYSDSAKG

SEQ ID NO: 672 - protein, 16 aa, Artificial
  Nanobody or Nanobody fragment
TISSSGYTDYSDSAKG

SEQ ID NO: 673 - protein, 16 aa, Artificial
  Nanobody or Nanobody fragment
TISSSGCTDYSDSAKG

SEQ ID NO: 674 - protein, 16 aa, Artificial
  Nanobody or Nanobody fragment
TISSSGYTDYADSAKG

SEQ ID NO: 675 - protein, 16 aa, Artificial
  Nanobody or Nanobody fragment
TISSSGYTDYSDSAKG

SEQ ID NO: 676 - protein, 16 aa, Artificial
  Nanobody or Nanobody fragment
TISSSGYTDYSDSAKG

SEQ ID NO: 677 - protein, 16 aa, Artificial
  Nanobody or Nanobody fragment
  misc_feature (12)..(12): Xaa can be any naturally occurring amino acid
TISTTGYTDYSXSAKG

SEQ ID NO: 678 - protein, 16 aa, Artificial
  Nanobody or Nanobody fragment
  misc_feature (12)..(12): Xaa can be any naturally occurring amino acid
TISTTGYTDYSXSAKG

SEQ ID NO: 679 - protein, 16 aa, Artificial
  Nanobody or Nanobody fragment
TISSTGYTDYSDSAKG

SEQ ID NO: 680 - protein, 16 aa, Artificial
  Nanobody or Nanobody fragment
TISTSGYTDYSDSAKG

SEQ ID NO: 681 - protein, 16 aa, Artificial
  Nanobody or Nanobody fragment
TISTSGYTDYSDSAKG

SEQ ID NO: 682 - protein, 16 aa, Artificial
  Nanobody or Nanobody fragment
TISSTGYTDYSDSAKG

SEQ ID NO: 683 - protein, 16 aa, Artificial
  Nanobody or Nanobody fragment
TISSTAYTDYSDSAKG

SEQ ID NO: 684 - protein, 16 aa, Artificial
  Nanobody or Nanobody fragment
TISSSGYTDYSDSAKG

SEQ ID NO: 685 - protein, 16 aa, Artificial
  Nanobody or Nanobody fragment
TVSTTGYTDYSDSAKG

SEQ ID NO: 686 - protein, 16 aa, Artificial
  Nanobody or Nanobody fragment
LITSSGSTNYADSVKG

SEQ ID NO: 687 - protein, 16 aa, Artificial
  Nanobody or Nanobody fragment
LITSSGSANYADSVKG

SEQ ID NO: 688 - protein, 16 aa, Artificial
  Nanobody or Nanobody fragment
LITSSGSANYADSVKG

SEQ ID NO: 689 - protein, 16 aa, Artificial
  Nanobody or Nanobody fragment
LITRSGSANYADSVKG

SEQ ID NO: 690 - protein, 16 aa, Artificial
  Nanobody or Nanobody fragment
LITSSGSANYADSVKG

SEQ ID NO: 691 - protein, 16 aa, Artificial
  Nanobody or Nanobody fragment
LITSSGSANYADSVKG

SEQ ID NO: 692 - protein, 16 aa, Artificial
  Nanobody or Nanobody fragment
LITNSGSANYABSVKG

SEQ ID NO: 693 - protein, 16 aa, Artificial
  Nanobody or Nanobody fragment
LITSSGSANYAESVKG

SEQ ID NO: 694 - protein, 16 aa, Artificial
  Nanobody or Nanobody fragment
LITSSGSANYADSVKG

SEQ ID NO: 695 - protein, 16 aa, Artificial
  Nanobody or Nanobody fragment
LITSSGSANYADSVKG

SEQ ID NO: 696 - protein, 16 aa, Artificial
  Nanobody or Nanobody fragment
LITSSGSANYADSVKG

SEQ ID NO: 697 - protein, 16 aa, Artificial
  Nanobody or Nanobody fragment
LITSSGSANYADSVKG

SEQ ID NO: 698 - protein, 16 aa, Artificial
  Nanobody or Nanobody fragment
LITRSGSANYADSVKG

SEQ ID NO: 699 - protein, 16 aa, Artificial
  Nanobody or Nanobody fragment
LITNSGSANYADSVKG

SEQ ID NO: 700 - protein, 16 aa, Artificial
  Nanobody or Nanobody fragment
  misc_feature (4)..(4): Xaa can be any naturally occurring amino acid
LITXSGSANYADSVKG

SEQ ID NO: 701 - protein, 16 aa, Artificial
  Nanobody or Nanobody fragment
LITSSGSTNYADSVKG

SEQ ID NO: 702 - protein, 16 aa, Artificial
  Nanobody or Nanobody fragment
QITSSDATNYADSVKG

SEQ ID NO: 703 - protein, 16 aa, Artificial
  Nanobody or Nanobody fragment
QITSSDATNYADSVKG

SEQ ID NO: 704 - protein, 16 aa, Artificial
  Nanobody or Nanobody fragment
SISRDGSTIYGDSVKG

SEQ ID NO: 705 - protein, 16 aa, Artificial
  Nanobody or Nanobody fragment
SISRDGSTIYGDSVKG

SEQ ID NO: 706 - protein, 16 aa, Artificial
  Nanobody or Nanobody fragment
SISRDGSTIYGDSVKG

SEQ ID NO: 707 - protein, 16 aa, Artificial
  Nanobody or Nanobody fragment
IILSSGTTDYADSVKG

SEQ ID NO: 708 - protein, 16 aa, Artificial
  Nanobody or Nanobody fragment
  misc_feature (3)..(3): Xaa can be any naturally occurring amino acid
  misc_feature (5)..(5): Xaa can be any naturally occurring amino acid
IIXSXGTTDYADSVKG

SEQ ID NO: 709 - protein, 16 aa, Artificial
  Nanobody or Nanobody fragment
TIIRDGKTYYSDSVKD

SEQ ID NO: 710 - protein, 13 aa, Artificial
  Nanobody or Nanobody fragment
IIAPFGTTNSRDS

SEQ ID NO: 711 - protein, 16 aa, Artificial
  Nanobody or Nanobody fragment
SVNSRGTTNYADSVKG

SEQ ID NO: 712 - protein, 16 aa, Artificial
  Nanobody or Nanobody fragment
TITRDGRTTYADSVKG

SEQ ID NO: 713 - protein, 16 aa, Artificial
  Nanobody or Nanobody fragment
VISSSGSTDYSDAVKG

SEQ ID NO: 714 - protein, 16 aa, Artificial
  Nanobody or Nanobody fragment
QITHEGTRNYADSVKG

SEQ ID NO: 715 - protein, 17 aa, Artificial
  Nanobody or Nanobody fragment
IIDRVGASTNYVDSVRG

SEQ ID NO: 716 - protein, 17 aa, Artificial
  Nanobody or Nanobody fragment
  misc_feature (13)..(13): Xaa can be any naturally occurring amino acid
IIDRGGASTNYVXSVRG

SEQ ID NO: 717 - protein, 17 aa, Artificial
  Nanobody or Nanobody fragment
IIDRSGASTNYVDSVRG

SEQ ID NO: 718 - protein, 16 aa, Artificial
  Nanobody or Nanobody fragment
VASNSGRTNYADSVKG

SEQ ID NO: 719 - protein, 16 aa, Artificial
  Nanobody or Nanobody fragment
AATNAGTTSYAGSVKG

SEQ ID NO: 720 - protein, 16 aa, Artificial
  Nanobody or Nanobody fragment
IITTAHSTNYVDSVKG

SEQ ID NO: 721 - protein, 16 aa, Artificial
  Nanobody or Nanobody fragment
IITSNHGTNYVDPVKG

SEQ ID NO: 722 - protein, 16 aa, Artificial
  Nanobody or Nanobody fragment
GIFSGALTNYADSVKG

SEQ ID NO: 723 - protein, 16 aa, Artificial
  Nanobody or Nanobody fragment
GIFSGAITNYADSVKG

SEQ ID NO: 724 - protein, 16 aa, Artificial
  Nanobody or Nanobody fragment
SITGGYGPNYVDSVKG

SEQ ID NO: 725 - protein, 16 aa, Artificial
  Nanobody or Nanobody fragment
YITSSGSTDYADSVKG

SEQ ID NO: 726 - protein, 16 aa, Artificial
  Nanobody or Nanobody fragment
AVTYAGNRYYVDSVKG

SEQ ID NO: 727 - protein, 16 aa, Artificial
  Nanobody or Nanobody fragment
AIFSGGLTHYADSVKG

SEQ ID NO: 728 - protein, 16 aa, Artificial
  Nanobody or Nanobody fragment
AISSDGLAHYTDSMKG

SEQ ID NO: 729 - protein, 16 aa, Artificial
  Nanobody or Nanobody fragment
YIHRSGTTYYADSVKG

SEQ ID NO: 730 - protein, 17 aa, Artificial
  Nanobody or Nanobody fragment
YIHRSGETTYYADSVKG

SEQ ID NO: 731 - protein, 16 aa, Artificial
  Nanobody or Nanobody fragment
YIHRSGTTYYADSVKG

SEQ ID NO: 732 - protein, 16 aa, Artificial
  Nanobody or Nanobody fragment
YSHRSGTTYYADSVKG

SEQ ID NO: 733 - protein, 16 aa, Artificial
  Nanobody or Nanobody fragment
YIHRSGTTYYADSVKG

SEQ ID NO: 734 - protein, 16 aa, Artificial
  Nanobody or Nanobody fragment
  misc_feature (2)..(2): Xaa can be any naturally occurring amino acid
YXHRSNTTYYADSVKG

SEQ ID NO: 735 - protein, 16 aa, Artificial
  Nanobody or Nanobody fragment
SISSGGNTYYABSVKG

SEQ ID NO: 736 - protein, 16 aa, Artificial
  Nanobody or Nanobody fragment
SISSGGSTYYADSVKG

SEQ ID NO: 737 - protein, 16 aa, Artificial
  Nanobody or Nanobody fragment
WITNEGRTEYADSVKG

SEQ ID NO: 738 - protein, 19 aa, Artificial
  Nanobody or Nanobody fragment
AIMWRGDATYTDYADSMKD

SEQ ID NO: 739 - protein, 16 aa, Artificial
  Nanobody or Nanobody fragment
TLTSSDSTKYADSVKS

SEQ ID NO: 740 - protein, 16 aa, Artificial
  Nanobody or Nanobody fragment
IISPGGGTNYADSVKG

SEQ ID NO: 741 - protein, 19 aa, Artificial
  Nanobody or Nanobody fragment
LISGITSDPSTYYLDSVRG

SEQ ID NO: 742 - protein, 16 aa, Artificial
  Nanobody or Nanobody fragment
SITSAGRIKYAESVKG

SEQ ID NO: 743 - protein, 17 aa, Artificial
  Nanobody or Nanobody fragment
CIRNSDGRTYYADSVKG

SEQ ID NO: 744 - protein, 16 aa, Artificial
  Nanobody or Nanobody fragment
AISSDGLAHYTDSMKG

SEQ ID NO: 745 - protein, 16 aa, Artificial
  Nanobody or Nanobody fragment
TINSASRTNYADSVKG

SEQ ID NO: 746 - protein, 16 aa, Artificial
  Nanobody or Nanobody fragment
VINSGGTKKYADSVKG

SEQ ID NO: 747 - protein, 17 aa, Artificial
  Nanobody or Nanobody fragment
AISWGGGRTNYEDSVKG

SEQ ID NO: 748 - protein, 17 aa, Artificial
  Nanobody or Nanobody fragment
AISWGGGRTNYEDSVKG

SEQ ID NO: 749 - protein, 17 aa, Artificial
  Nanobody or Nanobody fragment
AISWGGGRTNYEDSVKG

SEQ ID NO: 750 - protein, 17 aa, Artificial
  Nanobody or Nanobody fragment
AISWGGGRTNYEDSVKG

SEQ ID NO: 751 - protein, 17 aa, Artificial
  Nanobody or Nanobody fragment
AISWGGGRTNYEDSVKG

SEQ ID NO: 752 - protein, 17 aa, Artificial
  Nanobody or Nanobody fragment
AISWGGGRTNYEDSVKG

SEQ ID NO: 753 - protein, 17 aa, Artificial
  Nanobody or Nanobody fragment
AISWGGGRTNYEDSVKG

SEQ ID NO: 754 - protein, 17 aa, Artificial
  Nanobody or Nanobody fragment
AISWGGGRTNYEDSVKG

SEQ ID NO: 755 - protein, 17 aa, Artificial
  Nanobody or Nanobody fragment
AISWGGGRTDYEDSVKG

SEQ ID NO: 756 - protein, 17 aa, Artificial
  Nanobody or Nanobody fragment
AISWGGGRTKYEDSVTG

SEQ ID NO: 757 - protein, 17 aa, Artificial
  Nanobody or Nanobody fragment
AISWGGGRTKYEDSVTG

SEQ ID NO: 758 - protein, 17 aa, Artificial
  Nanobody or Nanobody fragment
AISWGGGRTNYGDSVKG

SEQ ID NO: 759 - protein, 17 aa, Artificial
  Nanobody or Nanobody fragment
AISWGGGRTNYEDSVKG

SEQ ID NO: 760 - protein, 17 aa, Artificial
  Nanobody or Nanobody fragment
AISWGGGRTNYEBSVKD

SEQ ID NO: 761 - protein, 17 aa, Artificial
  Nanobody or Nanobody fragment
AISWGGGRTNYEDSVKD

SEQ ID NO: 762 - protein, 17 aa, Artificial
  Nanobody or Nanobody fragment
AISWGGGRTKYEDSVTG

SEQ ID NO: 763 - protein, 17 aa, Artificial
  Nanobody or Nanobody fragment
AISWGGGRTKYEDSVTG

SEQ ID NO: 764 - protein, 16 aa, Artificial
  Nanobody or Nanobody fragment
VVTNGGSTEYADFVKG

SEQ ID NO: 765 - protein, 16 aa, Artificial
  Nanobody or Nanobody fragment
VVTNGGSTEYADFVKG

SEQ ID NO: 766 - protein, 17 aa, Artificial
  Nanobody or Nanobody fragment
CISSSDGSTYYABSVKG

SEQ ID NO: 767 - protein, 16 aa, Artificial
  Nanobody or Nanobody fragment
YITKRGSTKYADSVKG

SEQ ID NO: 768 - protein, 16 aa, Artificial
  Nanobody or Nanobody fragment
AITVPGITNYTDSVKD

SEQ ID NO: 769 - protein, 16 aa, Artificial
  Nanobody or Nanobody fragment
AIGSGGTTDYADSVKG

SEQ ID NO: 770 - protein, 17 aa, Artificial
  Nanobody or Nanobody fragment
AISYSGATTYYADSVKG

SEQ ID NO: 771 - protein, 16 aa, Artificial
  Nanobody or Nanobody fragment
TITWTGYTYYTDSVKG

SEQ ID NO: 772 - protein, 20 aa, Artificial
  Nanobody or Nanobody fragment
QVTSGVTSGGTTYYDDSVKG

SEQ ID NO: 773 - protein, 20 aa, Artificial
  Nanobody or Nanobody fragment
QVTSGVTSGGTTYYDDSVKG

SEQ ID NO: 774 - protein, 20 aa, Artificial
  Nanobody or Nanobody fragment
QVTSGVTSGGTTYYDDSVKG

SEQ ID NO: 775 - protein, 20 aa, Artificial
  Nanobody or Nanobody fragment
QVTSGVTSGGTTYYDDSVKG

SEQ ID NO: 776 - protein, 17 aa, Artificial
  Nanobody or Nanobody fragment
SITSRGSSTNYADSVKG

SEQ ID NO: 777 - protein, 17 aa, Artificial
  Nanobody or Nanobody fragment
SITSRGSSTNYADSAKG

SEQ ID NO: 778 - protein, 16 aa, Artificial
  Nanobody or Nanobody fragment
SITSRGTTRYABSVKG

SEQ ID NO: 779 - protein, 16 aa, Artificial
  Nanobody or Nanobody fragment
SITSRGTTRYTDSVKG

SEQ ID NO: 780 - protein, 16 aa, Artificial
  Nanobody or Nanobody fragment
SITSRGTTRYADSVKG

SEQ ID NO: 781 - protein, 16 aa, Artificial
  Nanobody or Nanobody fragment
TITGTGKTNYADSVKG

SEQ ID NO: 782 - protein, 16 aa, Artificial
  Nanobody or Nanobody fragment
TITGTGSTTYADSAKG

SEQ ID NO: 783 - protein, 18 aa, Artificial
  Nanobody or Nanobody fragment
IIFPGTGGSTVYEDSVKG

SEQ ID NO: 784 - protein, 18 aa, Artificial
  Nanobody or Nanobody fragment
IIAPGTGGSTHYEDSVKG

SEQ ID NO: 785 - protein, 17 aa, Artificial
  Nanobody or Nanobody fragment
GISASSIRTSYADSVKG

SEQ ID NO: 786 - protein, 17 aa, Artificial
  Nanobody or Nanobody fragment
GISASSIRTSYADSVKG

SEQ ID NO: 787 - protein, 17 aa, Artificial
  Nanobody or Nanobody fragment
TISANGELIYYANFVEG

SEQ ID NO: 788 - protein, 16 aa, Artificial
  Nanobody or Nanobody fragment
TITTRGTTNYVDAVKG

SEQ ID NO: 789 - protein, 16 aa, Artificial
  Nanobody or Nanobody fragment
NIYSGGSTNYADTVKG

SEQ ID NO: 790 - protein, 17 aa, Artificial
  Nanobody or Nanobody fragment
RITSGGSHRNYABSVKG

SEQ ID NO: 791 - protein, 16 aa, Artificial
  Nanobody or Nanobody fragment
TMTSGGNTRYADSVKG

SEQ ID NO: 792 - protein, 17 aa, Artificial
  Nanobody or Nanobody fragment
CISSPDGSTYLVDSVKG

SEQ ID NO: 793 - protein, 17 aa, Artificial
  Nanobody or Nanobody fragment
TISASGVRTRYADSVTG

SEQ ID NO: 794 - protein, 16 aa, Artificial
  Nanobody or Nanobody fragment
SNWATGATAYADSVKG

SEQ ID NO: 795 - protein, 16 aa, Artificial
  Nanobody or Nanobody fragment
AIWNTDNTDYADSVKG

SEQ ID NO: 796 - protein, 17 aa, Artificial
  Nanobody or Nanobody fragment
AIIRSGGNTAYSDSVKG

SEQ ID NO: 797 - protein, 17 aa, Artificial
  Nanobody or Nanobody fragment
AIRWSGGTTSYADFVKG

SEQ ID NO: 798 - protein, 17 aa, Artificial
  Nanobody or Nanobody fragment
CISSSDGYKFYADSVKD

SEQ ID NO: 799 - protein, 16 aa, Artificial
  Nanobody or Nanobody fragment
QLNSGGTTTYADSVKG

SEQ ID NO: 800 - protein, 16 aa, Artificial
  Nanobody or Nanobody fragment
TITSDGSTYYADSVKG

SEQ ID NO: 801 - protein, 16 aa, Artificial
  Nanobody or Nanobody fragment
FITNGEETNYAETVKG

SEQ ID NO: 802 - protein, 17 aa, Artificial
  Nanobody or Nanobody fragment
CISSSAGSAYYADSVKG

SEQ ID NO: 803 - protein, 17 aa, Artificial
  Nanobody or Nanobody fragment
CISSSDGSIFYADSVKG

SEQ ID NO: 804 - protein, 16 aa, Artificial
  Nanobody or Nanobody fragment
FITNGEETNYAETVKG

SEQ ID NO: 805 - protein, 16 aa, Artificial
  Nanobody or Nanobody fragment
TISRSGSAIYAYPVKG

SEQ ID NO: 806 - protein, 32 aa, Artificial
  Nanobody or Nanobody fragment
RFTISRDNAKNTVYLQMNSLKPEDTAVYYCAT

SEQ ID NO: 807 - protein, 32 aa, Artificial; identical to SEQ ID NO: 806
  Nanobody or Nanobody fragment

SEQ ID NO: 808 - protein, 32 aa, Artificial; identical to SEQ ID NO: 806
  Nanobody or Nanobody fragment

SEQ ID NO: 809 - protein, 32 aa, Artificial; identical to SEQ ID NO: 806
  Nanobody or Nanobody fragment

SEQ ID NO: 810 - protein, 32 aa, Artificial; identical to SEQ ID NO: 806
  Nanobody or Nanobody fragment

SEQ ID NO: 811 - protein, 32 aa, Artificial
  Nanobody or Nanobody fragment
RFTISSDNAKNTVYLQMNSLKPEDTAVYYCAA

SEQ ID NO: 812 - protein, 32 aa, Artificial
  Nanobody or Nanobody fragment
RFTVSSDNAKNTVYLQMNSLKPEDTAVYYCAA

SEQ ID NO: 813 - protein, 32 aa, Artificial
  Nanobody or Nanobody fragment
RFTISSDDAKNTVYLQMNSLKPEDTAVYYCAA

SEQ ID NO: 814 - protein, 32 aa, Artificial; identical to SEQ ID NO: 811
  Nanobody or Nanobody fragment

SEQ ID NO: 815 - protein, 32 aa, Artificial
  Nanobody or Nanobody fragment
RFTISSDNAKNTMYLQMNSLKPEDTAVYYCAA

SEQ ID NO: 816 - protein, 32 aa, Artificial
  Nanobody or Nanobody fragment
  misc_feature (6)..(6): Xaa can be any naturally occurring amino acid
RFTISXDNAKNTVSLQMNSLKPEDTAVYYCAA

SEQ ID NO: 817 - protein, 32 aa, Artificial
  Nanobody or Nanobody fragment
RFTIAKDNAKNAGYLQMDNLKPEDTAVYYCNA

SEQ ID NO: 818 - protein, 32 aa, Artificial; identical to SEQ ID NO: 817
  Nanobody or Nanobody fragment

SEQ ID NO: 819 - protein, 32 aa, Artificial
  Nanobody or Nanobody fragment
RFTISRDNAKNTVYLQMNSLKPEDTAVYSCNA

SEQ ID NO: 820 - protein, 32 aa, Artificial; identical to SEQ ID NO: 819
  Nanobody or Nanobody fragment

SEQ ID NO: 821 - protein, 32 aa, Artificial
  Nanobody or Nanobody fragment
RFTISRDDAKNTLYLQMNSLKPEDTAVYYCAK

SEQ ID NO: 822 - protein, 32 aa, Artificial; identical to SEQ ID NO: 821
  Nanobody or Nanobody fragment

SEQ ID NO: 823 - protein, 32 aa, Artificial; identical to SEQ ID NO: 821
  Nanobody or Nanobody fragment

SEQ ID NO: 824 - protein, 32 aa, Artificial; identical to SEQ ID NO: 811
  Nanobody or Nanobody fragment

SEQ ID NO: 825 - protein, 32 aa, Artificial; identical to SEQ ID NO: 811
  Nanobody or Nanobody fragment

SEQ ID NO: 826 - protein, 32 aa, Artificial
  Nanobody or Nanobody fragment
RLTISKDNAKNTASLQMNSLKPEDTAVYYCFV

SEQ ID NO: 827 - protein, 32 aa, Artificial
  Nanobody or Nanobody fragment
RFTISKDNAKNTASLQMNSLKPEDTAVYYCFV

SEQ ID NO: 828 - protein, 32 aa, Artificial; identical to SEQ ID NO: 827
  Nanobody or Nanobody fragment

SEQ ID NO: 829 - protein, 32 aa, Artificial; identical to SEQ ID NO: 811
  Nanobody or Nanobody fragment

SEQ ID NO: 830 - protein, 32 aa, Artificial
  Nanobody or Nanobody fragment
RFTISRDNAKNTVSLQMSSLEPEDTAVYYCNA

SEQ ID NO: 831 - protein, 32 aa, Artificial
  Nanobody or Nanobody fragment
RFTIARDNAKNTMYLQMNSLKPEDTAIYYCNA

SEQ ID NO: 832 - protein, 32 aa, Artificial
  Nanobody or Nanobody fragment
RFTISRDVPKNTVSLQMNSLKPEDTAVYYCNG

SEQ ID NO: 833 - protein, 27 aa, Artificial
  Nanobody or Nanobody fragment
RFTISRDLSLQMNNLNPEDSAVYLCNM

SEQ ID NO: 834 - protein, 32 aa, Artificial
  Nanobody or Nanobody fragment
RFTISSDNAKNTVSLQMNSLKPEDTAVYYCAA

SEQ ID NO: 835 - protein, 32 aa, Artificial
  Nanobody or Nanobody fragment
RFTISRDNAKNTVYLQMNNLQPDDTAAYYCNA

SEQ ID NO: 836 - protein, 32 aa, Artificial
  Nanobody or Nanobody fragment
RFTISRDNAKNTVYLQMNSLKPDDTAAYYCNA

SEQ ID NO: 837 - protein, 32 aa, Artificial
  Nanobody or Nanobody fragment
RFTISRDNAKNTVBLQMNSLKPDDTAAYYCNA

SEQ ID NO: 838 - protein, 32 aa, Artificial; identical to SEQ ID NO: 836
  Nanobody or Nanobody fragment

SEQ ID NO: 839 - protein, 32 aa, Artificial
  Nanobody or Nanobody fragment
RFTISRDNAKNTVDLQMNSLKPDDTAAYYCNA

SEQ ID NO: 840 - protein, 32 aa, Artificial; identical to SEQ ID NO: 835
  Nanobody or Nanobody fragment

SEQ ID NO: 841 - protein, 31 aa, Artificial
  Nanobody or Nanobody fragment
RFTISRDNKNTVHLQMNSLKPEDTAVYYCRA

SEQ ID NO: 842 - protein, 31 aa, Artificial; identical to SEQ ID NO: 841
  Nanobody or Nanobody fragment

SEQ ID NO: 843 - protein, 31 aa, Artificial; identical to SEQ ID NO: 841
  Nanobody or Nanobody fragment

SEQ ID NO: 844 - protein, 31 aa, Artificial; identical to SEQ ID NO: 841
  Nanobody or Nanobody fragment

SEQ ID NO: 845 - protein, 31 aa, Artificial
  Nanobody or Nanobody fragment
  misc_feature (9)..(9): Xaa can be any naturally occurring amino acid
RFTISRDDXNTVHLQMNSLKPEDTAVYYCRA

SEQ ID NO: 846 - protein, 31 aa, Artificial
  Nanobody or Nanobody fragment
RFTISRDNENTVHLQMNSLKPEDTGVYYCRA

SEQ ID NO: 847 - protein, 31 aa, Artificial
  Nanobody or Nanobody fragment
RFTISRDSKNTVHLQMNSLKPEDTAVYYCRA

SEQ ID NO: 848 - protein, 31 aa, Artificial; identical to SEQ ID NO: 841
  Nanobody or Nanobody fragment

SEQ ID NO: 849 - protein, 31 aa, Artificial; identical to SEQ ID NO: 841
  Nanobody or Nanobody fragment

SEQ ID NO: 850 - protein, 31 aa, Artificial; identical to SEQ ID NO: 841
  Nanobody or Nanobody fragment

SEQ ID NO: 851 - protein, 31 aa, Artificial; identical to SEQ ID NO: 841
  Nanobody or Nanobody fragment

SEQ ID NO: 852 - protein, 31 aa, Artificial
  Nanobody or Nanobody fragment
RFTISRDNKNTVYLQMNSLKPEDTAIYYCRA

SEQ ID NO: 853 - protein, 31 aa, Artificial; identical to SEQ ID NO: 841
  Nanobody or Nanobody fragment

SEQ ID NO: 854 - protein, 31 aa, Artificial
  Nanobody or Nanobody fragment
RFTISRDDENTVHLQMNSLKPEDTAVYYCRA

SEQ ID NO: 855 - protein, 31 aa, Artificial; identical to SEQ ID NO: 852
  Nanobody or Nanobody fragment

SEQ ID NO: 856 - protein, 32 aa, Artificial
  Nanobody or Nanobody fragment
RFTISRDVAKNTLYLQMNSLKPEDTGVYYCNA

SEQ ID NO: 857 - protein, 32 aa, Artificial
  Nanobody or Nanobody fragment
RFTISRDNAKNTLYLQMNSLKPEDTGVYYCNA

SEQ ID NO: 858 - protein, 32 aa, Artificial; identical to SEQ ID NO: 857
  Nanobody or Nanobody fragment

SEQ ID NO: 859 - protein, 32 aa, Artificial
  Nanobody or Nanobody fragment
RFTISRDSAKNTLYLQMNSLKPEDTGVYYCNA

SEQ ID NO: 860 - protein, 32 aa, Artificial
  Nanobody or Nanobody fragment
RFTISRDNAKNTLYLQMNSLKSEDTGVYYCNA

SEQ ID NO: 861 - protein, 32 aa, Artificial; identical to SEQ ID NO: 857
  Nanobody or Nanobody fragment

SEQ ID NO: 862 - protein, 32 aa, Artificial; identical to SEQ ID NO: 857
  Nanobody or Nanobody fragment

SEQ ID NO: 863 - protein, 32 aa, Artificial; identical to SEQ ID NO: 857
  Nanobody or Nanobody fragment

SEQ ID NO: 864 - protein, 32 aa, Artificial; identical to SEQ ID NO: 857
  Nanobody or Nanobody fragment

SEQ ID NO: 865 - protein, 32 aa, Artificial; identical to SEQ ID NO: 857
  Nanobody or Nanobody fragment

SEQ ID NO: 866 - protein, 32 aa, Artificial
  Nanobody or Nanobody fragment
RFTISRDNAKNTLYLQMNSLEPEDTGVYYCNA

SEQ ID NO: 867 - protein, 32 aa, Artificial; identical to SEQ ID NO: 857
  Nanobody or Nanobody fragment

SEQ ID NO: 868 - protein, 32 aa, Artificial; identical to SEQ ID NO: 857
  Nanobody or Nanobody fragment

SEQ ID NO: 869 - protein, 32 aa, Artificial
  Nanobody or Nanobody fragment
RFTISRDNAKNTFYLQMNSLKPEDTGVYYCNA

SEQ ID NO: 870 - protein, 32 aa, Artificial
  Nanobody or Nanobody fragment
  misc_feature (7)..(7): Xaa can be any naturally occurring amino acid
  misc_feature (10)..(10): Xaa can be any naturally occurring amino acid
  misc_feature (32)..(32): Xaa can be any naturally occurring amino acid
RFTISRXNAXNTLYLQMNSLKPEDTGVYYCNX

SEQ ID NO: 871 - protein, 32 aa, Artificial; identical to SEQ ID NO: 857
  Nanobody or Nanobody fragment

SEQ ID NO: 872 - protein, 32 aa, Artificial
  Nanobody or Nanobody fragment
RFTISRDNAKKTVDLQMNSLKPEDTAVYYCLL

SEQ ID NO: 873 - protein, 32 aa, Artificial; identical to SEQ ID NO: 872
  Nanobody or Nanobody fragment

SEQ ID NO: 874 - protein, 32 aa, Artificial
  Nanobody or Nanobody fragment
RFTISRDNAKNTAYLQMNSLKPEDTAVYVCKA

SEQ ID NO: 875 - protein, 32 aa, Artificial
  Nanobody or Nanobody fragment
RFTISRDSAKNTAYLQMNRLKPEDTAVYVCKA

SEQ ID NO: 876 - protein, 32 aa, Artificial
  Nanobody or Nanobody fragment
RFTISRDNAKNTAYLQMNNLKPEDTAVYVCKA

SEQ ID NO: 877 - protein, 32 aa, Artificial
  Nanobody or Nanobody fragment
RFTISRDNAKNIVYLQMNSLKPEDTAVYYCRV

SEQ ID NO: 878 - protein, 32 aa, Artificial
  Nanobody or Nanobody fragment
  misc_feature (31)..(32): Xaa can be any naturally occurring amino acid
RFTISRDNAKNTVYLQMNSLKPEDTAVYYCXX

SEQ ID NO: 879 - protein, 32 aa, Artificial
  Nanobody or Nanobody fragment
RFTISRDNAKNTAYLQMNSLKPEDTAVYYCYT

SEQ ID NO: 880 - protein, 32 aa, Artificial
  Nanobody or Nanobody fragment
RFTISRDNAKNIVYLQMNSLEPEDTAVYYCRI

SEQ ID NO: 881 - protein, 32 aa, Artificial
  Nanobody or Nanobody fragment
RAIISRDNAKNTVYLQMNSLKPEDTAVYYCYA

SEQ ID NO: 882 - protein, 32 aa, Artificial
  Nanobody or Nanobody fragment
RFTLSRDNTKNTVSLQMNSLKPEDTAVYYCLA

SEQ ID NO: 883 - protein, 32 aa, Artificial
  Nanobody or Nanobody fragment
RFTISTVNAGNTVYLEMNSLKPEDTAVYYCRA

SEQ ID NO: 884 - protein, 38 aa, Artificial
  Nanobody or Nanobody fragment
RFTISREFTLSRDGPKEMVHLQMVSLKPEDTAVYYCNA

SEQ ID NO: 885 - protein, 34 aa, Artificial
  Nanobody or Nanobody fragment
RFTISRSNAKNENMLYLQMNSLKPEDTAVYYCNT

SEQ ID NO: 886 - protein, 34 aa, Artificial
  Nanobody or Nanobody fragment
RFTISRSNAKNQSMLYLQMNSLKPEDTAVYYCNT

SEQ ID NO: 887 - protein, 34 aa, Artificial
  Nanobody or Nanobody fragment
RFTISRSNAKNKNMLYLQMNSLKPEDTAVYYCNT

SEQ ID NO: 888 - protein, 32 aa, Artificial
  Nanobody or Nanobody fragment
RFTISRDNAKNTVYLQMNNLKPEDTAVYYCNS

SEQ ID NO: 889 - protein, 32 aa, Artificial
  Nanobody or Nanobody fragment
RFTISRDNAKNTVILQMNNLKPEBTAVYYCRV

SEQ ID NO: 890 - protein, 32 aa, Artificial
  Nanobody or Nanobody fragment
RFTISRDNAKNTLYLEMNSLKPEDTGVYYCNK

SEQ ID NO: 891 - protein, 32 aa, Artificial
  Nanobody or Nanobody fragment
RFTISRDNAKNTLYLQMNSLKPEDTGVYYCNK

SEQ ID NO: 892 - protein, 32 aa, Artificial
  Nanobody or Nanobody fragment
RFTISRDNAKNTVFLQMNSLKTEDTGTYYCRS

SEQ ID NO: 893 - protein, 32 aa, Artificial
  Nanobody or Nanobody fragment
RFTISRDNAKNTVFLQMNSLKTEDTATYYCRA

SEQ ID NO: 894 - protein, 32 aa, Artificial
  Nanobody or Nanobody fragment
RFTISRDDAKNTLYLQMNSLKPEDTAVYYCNQ

SEQ ID NO: 895 - protein, 32 aa, Artificial
  Nanobody or Nanobody fragment
RFTISRDNADNTVYLQMNSLKPEDTAVYYCAV

SEQ ID NO: 896 - protein, 32 aa, Artificial
  Nanobody or Nanobody fragment
RFTISRDDAKNKVYLQMNSLKPEDTAVYYCAA

SEQ ID NO: 897 - protein, 32 aa, Artificial
  Nanobody or Nanobody fragment
RFTISRDNAKNTLYLQMNSLKPEDTAVYYCKF

SEQ ID NO: 898 - protein, 32 aa, Artificial
  Nanobody or Nanobody fragment
RVIISRDNVENTVYLQMNSLKPEDTAVYYCAA

SEQ ID NO: 899 - protein, 32 aa, Artificial
  Nanobody or Nanobody fragment
RLTISRDNAKSTVYLQMNSLKPEDTAVYHCAA

SEQ ID NO: 900 - protein, 32 aa, Artificial
  Nanobody or Nanobody fragment
RFTISRDNAKSTVYLQMNSLKPEDTAVYHCAA

SEQ ID NO: 901 - protein, 32 aa, Artificial; identical to SEQ ID NO: 900
  Nanobody or Nanobody fragment

SEQ ID NO: 902 - protein, 32 aa, Artificial; identical to SEQ ID NO: 900
  Nanobody or Nanobody fragment

SEQ ID NO: 903 - protein, 32 aa, Artificial
  Nanobody or Nanobody fragment
  misc_feature (6)..(6): Xaa can be any naturally occurring amino acid
RFTISXDNAKSTVYLQMNSLKPEDTAVYHCAA

SEQ ID NO: 904 - protein, 32 aa, Artificial; identical to SEQ ID NO: 900
  Nanobody or Nanobody fragment

SEQ ID NO: 905 - protein, 32 aa, Artificial
  Nanobody or Nanobody fragment
RFTISRDNGNNTMYLQMNNLKPEDTAVYYCNW

SEQ ID NO: 906 - protein, 32 aa, Artificial; identical to SEQ ID NO: 905
  Nanobody or Nanobody fragment

SEQ ID NO: 907 - protein, 32 aa, Artificial
  Nanobody or Nanobody fragment
RFTISRDNAQNTLYLLMNSLKPEDTAVYYCYG

SEQ ID NO: 908 - protein, 32 aa, Artificial
  Nanobody or Nanobody fragment
RFTISRDNAKNTVYLQMNSLKPEDTAIYYCAA

SEQ ID NO: 909 - protein, 32 aa, Artificial
  Nanobody or Nanobody fragment
RFTISRDNAKNTVYLQMNSLKPEDTAVYYCNA

SEQ ID NO: 910 - protein, 32 aa, Artificial; identical to SEQ ID NO: 909
  Nanobody or Nanobody fragment

SEQ ID NO: 911 - protein, 32 aa, Artificial
  Nanobody or Nanobody fragment
RFSISRDNALNTVYLQMNSLKPEDTAVYYCKQ

SEQ ID NO: 912 - protein, 32 aa, Artificial
  Nanobody or Nanobody fragment
RFGISRDNAKNTVSLQMNSLKPEDTAVYYCNA

SEQ ID NO: 913 - protein, 32 aa, Artificial
  Nanobody or Nanobody fragment
RFTISSDNAKNTVYLQMNSLKPEDTALYYCAA

SEQ ID NO: 914 - protein, 32 aa, Artificial
  Nanobody or Nanobody fragment
  misc_feature (7)..(7): Xaa can be any naturally occurring amino acid
RVIISRXNVENTVYLQMNSLKPEDTAVYYCAA

SEQ ID NO: 915 - protein, 32 aa, Artificial
  Nanobody or Nanobody fragment
RFTISRDTGKSILYLQMNNLEPEDTAVYYCKI

SEQ ID NO: 916 - protein, 32 aa, Artificial
  Nanobody or Nanobody fragment
RFTISIDNVKRTLYLEMNSLRPEDTAVYYCST

SEQ ID NO: 917 - protein, 32 aa, Artificial
  Nanobody or Nanobody fragment
RFTISRDNAQNTVYLQMNSLKPEDTAVYYCAA

SEQ ID NO: 918 - protein, 32 aa, Artificial; identical to SEQ ID NO: 917
  Nanobody or Nanobody fragment

SEQ ID NO: 919 - protein, 32 aa, Artificial; identical to SEQ ID NO: 917
  Nanobody or Nanobody fragment

SEQ ID NO: 920 - protein, 32 aa, Artificial; identical to SEQ ID NO: 917
  Nanobody or Nanobody fragment

SEQ ID NO: 921 - protein, 32 aa, Artificial; identical to SEQ ID NO: 917
  Nanobody or Nanobody fragment

SEQ ID NO: 922 - protein, 32 aa, Artificial; identical to SEQ ID NO: 917
  Nanobody or Nanobody fragment

SEQ ID NO: 923 - protein, 32 aa, Artificial; identical to SEQ ID NO: 917
  Nanobody or Nanobody fragment

SEQ ID NO: 924 - protein, 32 aa, Artificial; identical to SEQ ID NO: 917
  Nanobody or Nanobody fragment

SEQ ID NO: 925 - protein, 32 aa, Artificial
  Nanobody or Nanobody fragment
RFTISRDNARNTVYLQMNSLKPEDTAVYYCAA

SEQ ID NO: 926 - protein, 32 aa, Artificial
  Nanobody or Nanobody fragment
RFTISRDNAQNTVYLQMDSLKPEDTAVYYCAA

SEQ ID NO: 927 - protein, 32 aa, Artificial; identical to SEQ ID NO: 917
  Nanobody or Nanobody fragment

SEQ ID NO: 928 - protein, 32 aa, Artificial
  Nanobody or Nanobody fragment
RSTISRDNAQNTVYLQMNSLKPEDTAVYYCAA

SEQ ID NO: 929 - protein, 32 aa, Artificial; identical to SEQ ID NO: 928
  Nanobody or Nanobody fragment

SEQ ID NO: 930 - protein, 32 aa, Artificial; identical to SEQ ID NO: 917
  Nanobody or Nanobody fragment

SEQ ID NO: 931 - protein, 32 aa, Artificial; identical to SEQ ID NO: 917
  Nanobody or Nanobody fragment

SEQ ID NO: 932 - protein, 32 aa, Artificial; identical to SEQ ID NO: 926
  Nanobody or Nanobody fragment

SEQ ID NO: 933 - protein, 32 aa, Artificial; identical to SEQ ID NO: 926
  Nanobody or Nanobody fragment

SEQ ID NO: 934 - protein, 32 aa, Artificial
  Nanobody or Nanobody fragment
RFTVSREYAKNAVYLQMNSLKPEDTAVYYCYA

SEQ ID NO: 935 - protein, 32 aa, Artificial; identical to SEQ ID NO: 934
  Nanobody or Nanobody fragment

SEQ ID NO: 936 - protein, 32 aa, Artificial; identical to SEQ ID NO: 806
  Nanobody or Nanobody fragment

SEQ ID NO: 937 - protein, 32 aa, Artificial
  Nanobody or Nanobody fragment
RFTISRDNAKNMATLQMNSLKPEDTAVYYCAA

SEQ ID NO: 938 - protein, 32 aa, Artificial
  Nanobody or Nanobody fragment
RFTISRDSAKNTVYLQMNKLKPEDTAVYYCAA

SEQ ID NO: 939 - protein, 32 aa, Artificial
  Nanobody or Nanobody fragment
RFTISKANAKNTLYLQMNSLKPEDTAVYYCYV

SEQ ID NO: 940 - protein, 32 aa, Artificial
  Nanobody or Nanobody fragment
RFTISRDNAKSTAYLQMNSLQPEDTAVYYCAA

SEQ ID NO: 941 - protein, 32 aa, Artificial
  Nanobody or Nanobody fragment
RFTISRDNAKKTVYLRMDKLKPEDTAVYYCAA

SEQ ID NO: 942 - protein, 32 aa, Artificial
  Nanobody or Nanobody fragment
RFTISRDNAKNMVSLQMNSLKPEDTAVYYCNV

SEQ ID NO: 943 - protein, 32 aa, Artificial; identical to SEQ ID NO: 942
  Nanobody or Nanobody fragment

SEQ ID NO: 944 - protein, 32 aa, Artificial; identical to SEQ ID NO: 942
  Nanobody or Nanobody fragment

SEQ ID NO: 945 - protein, 32 aa, Artificial; identical to SEQ ID NO: 942
  Nanobody or Nanobody fragment

SEQ ID NO: 946 - protein, 32 aa, Artificial
  Nanobody or Nanobody fragment
RFTISRDNAKNTLYLQMNSLKPGDTAMYYCAK

SEQ ID NO: 947 - protein, 32 aa, Artificial; identical to SEQ ID NO: 946
  Nanobody or Nanobody fragment

SEQ ID NO: 948 - protein, 32 aa, Artificial
  Nanobody or Nanobody fragment
RFTISTSNDKSTVYLQMNSLKPEDTAVYYCAA

SEQ ID NO: 949 - protein, 32 aa, Artificial
  Nanobody or Nanobody fragment
RFTISRGNDKSTVYLQMNSLKPEDTAVYYCAA

SEQ ID NO: 950 - protein, 32 aa, Artificial
  Nanobody or Nanobody fragment
RFTISRGNDMSTVYLQMNSLKPEDTAVYYCAA

SEQ ID NO: 951 - protein, 30 aa, Artificial
  Nanobody or Nanobody fragment
RFTISRDIGTLYLQMNSLKPEDTAVYYCNL

SEQ ID NO: 952 - protein, 30 aa, Artificial
  Nanobody or Nanobody fragment
  misc_feature (7)..(7): Xaa can be any naturally occurring amino acid
RFTISRXIGTLYLQMNSLKPEDTGVYYCNL

SEQ ID NO: 953 - protein, 32 aa, Artificial
  Nanobody or Nanobody fragment
RFTISRVNAKNTLYLQMDSLRPEDTGVYYCAR

SEQ ID NO: 954 - protein, 32 aa, Artificial
  Nanobody or Nanobody fragment
RFTISRVNAKNTLYLQMDSLRPEDTAVYYCAR

SEQ ID NO: 955 - protein, 32 aa, Artificial
  Nanobody or Nanobody fragment
RFTISRDHAKNTLYLQMNSLKVEDTAVYYCAQ

SEQ ID NO: 956 - protein, 32 aa, Artificial; identical to SEQ ID NO: 955
  Nanobody or Nanobody fragment

SEQ ID NO: 957 - protein, 32 aa, Artificial
  Nanobody or Nanobody fragment
RFTISRDNAKNTVYLQMNSLKPEDTAVYFCAA

SEQ ID NO: 958 - protein, 32 aa, Artificial
  Nanobody or Nanobody fragment
RFTISKDNAKNTMYLQMNSLKPEDTAVYYCAA

SEQ ID NO: 959 - protein, 32 aa, Artificial
  Nanobody or Nanobody fragment
RFTILSDNAKNTVYLQMTSLKPEDTGVYYCSV

SEQ ID NO: 960 - protein, 32 aa, Artificial
  Nanobody or Nanobody fragment
RFTISIDNTRKTVYLQMNSLKPEDTAVYYCYG

SEQ ID NO: 961 - protein, 32 aa, Artificial
  Nanobody or Nanobody fragment
RSTISRENAKKTITLQMNNLKPEDTGVYYCNL

SEQ ID NO: 962 - protein, 32 aa, Artificial
  Nanobody or Nanobody fragment
RFTVSSDNAKNTAYLQMNSLKPEDTAVYYCAL

SEQ ID NO: 963 - protein, 32 aa, Artificial
  Nanobody or Nanobody fragment
RFTISRDYAKRTLYLQMNSLSPEDTGVYYCVR

SEQ ID NO: 964 - protein, 32 aa, Artificial
  Nanobody or Nanobody fragment
RFTISRDDAKNVVYLQMNNLKPEDTAVYYCNR

SEQ ID NO: 965 - protein, 32 aa, Artificial
  Nanobody or Nanobody fragment
RFTISRDNAKKTVYLQMNRLKPEDTAVYYCSA

SEQ ID NO: 966 - protein, 32 aa, Artificial
  Nanobody or Nanobody fragment
RFTISRDNAKNTVYLQMKSLKPEDTGIYYCAR

SEQ ID NO: 967 - protein, 32 aa, Artificial
  Nanobody or Nanobody fragment
RFTMSRDNAKNTIYLEMNSLKPEDTAVYYCAA

SEQ ID NO: 968 - protein, 32 aa, Artificial; identical to SEQ ID NO: 811
  Nanobody or Nanobody fragment

SEQ ID NO: 969 - protein, 32 aa, Artificial
  Nanobody or Nanobody fragment
RFTISRDNAKSTVYLQMHSLKPEDTAVYYCFL

SEQ ID NO: 970 - protein, 32 aa, Artificial
  Nanobody or Nanobody fragment
RFTISRDNAKNTLYLQMNSLKPEDTAAYYCKA

SEQ ID NO: 971 - protein, 32 aa, Artificial
  Nanobody or Nanobody fragment
RFTVSRDNAKNTVSLQMNSLKPEDTGVYYCNL

SEQ ID NO: 972 - protein, 32 aa, Artificial
  Nanobody or Nanobody fragment
RFTISRDNAKNTLYLQMNSLKPEDTAVYYCAA

SEQ ID NO: 973 - protein, 32 aa, Artificial; identical to SEQ ID NO: 811
  Nanobody or Nanobody fragment

SEQ ID NO: 974 - protein, 32 aa, Artificial; identical to SEQ ID NO: 971
  Nanobody or Nanobody fragment

SEQ ID NO: 975 - protein, 32 aa, Artificial
  Nanobody or Nanobody fragment
RFTMSRDNAKNTVYLEMNSLKPEDTAVFYCAA

SEQ ID NO: 976 - protein, 17 aa, Artificial
  Nanobody or Nanobody fragment
LNLFTTCDGPWGYEYDY

SEQ ID NO: 977 - protein, 17 aa, Artificial
  Nanobody or Nanobody fragment
LNLFTTCDGPWGYEYDY

SEQ ID NO: 978 - protein, 17 aa, Artificial
  Nanobody or Nanobody fragment
LNLFTTCDGPWGYEYDY

SEQ ID NO: 979 - protein, 17 aa, Artificial
  Nanobody or Nanobody fragment
LNLFTTCDGPWGYEYDY

SEQ ID NO: 980 - protein, 17 aa, Artificial
  Nanobody or Nanobody fragment
LNLFTTCDGPWGYEYDY

SEQ ID NO: 981 - protein, 18 aa, Artificial
  Nanobody or Nanobody fragment
DPRFEPTLLCTDYDYEDY

SEQ ID NO: 982 - protein, 17 aa, Artificial
  Nanobody or Nanobody fragment
  misc_feature (3)..(3): Xaa can be any naturally occurring amino acid
BPXLSPQTYCTDYDYSY

SEQ ID NO: 983 - protein, 16 aa, Artificial
  Nanobody or Nanobody fragment
TPRRFGWCSDYBEYDY

SEQ ID NO: 984 - protein, 16 aa, Artificial
  Nanobody or Nanobody fragment
TPRRFGWCSDYDEYDY

SEQ ID NO: 985 - protein, 16 aa, Artificial
  Nanobody or Nanobody fragment
  misc_feature (8)..(8): Xaa can be any naturally occurring amino acid
  misc_feature (13)..(13): Xaa can be any naturally occurring amino acid
TPRRFGWXSDYDXYDY

SEQ ID NO: 986 - protein, 17 aa, Artificial
  Nanobody or Nanobody fragment
  misc_feature (1)..(1): Xaa can be any naturally occurring amino acid
XRKIIGLWCSDYDNYDY

SEQ ID NO: 987 - protein, 11 aa, Artificial
  Nanobody or Nanobody fragment
AGSTIDGGFSS

SEQ ID NO: 988 - protein, 11 aa, Artificial
  Nanobody or Nanobody fragment
AGSTIDGGFSS

SEQ ID NO: 989 - protein, 11 aa, Artificial
  Nanobody or Nanobody fragment
RVIAPGRLDDI

SEQ ID NO: 990 - protein, 11 aa, Artificial
  Nanobody or Nanobody fragment
RVIAPGRLDDI

SEQ ID NO: 991 - protein, 17 aa, Artificial
  Nanobody or Nanobody fragment
PIYYSPNTYPPTSRYDY

SEQ ID NO: 992 - protein, 17 aa, Artificial
  Nanobody or Nanobody fragment
PTFYSPNMYPPTSRYDY

SEQ ID NO: 993 - protein, 17 aa, Artificial
  Nanobody or Nanobody fragment
PTFYSPNMYPPTSRYDY

SEQ ID NO: 994 - protein, 18 aa, Artificial
  Nanobody or Nanobody fragment
DRRGKSEMYCTDYSYSDA

SEQ ID NO: 995 - protein, 18 aa, Artificial
  Nanobody or Nanobody fragment
DRRGKSEMYCTDYAYSDA

SEQ ID NO: 996 - protein, 11 aa, Artificial
  Nanobody or Nanobody fragment
RTVGTGSLFDY

SEQ ID NO: 997 - protein, 11 aa, Artificial
  Nanobody or Nanobody fragment
RTVGTGSLFDY

SEQ ID NO: 998 - protein, 11 aa, Artificial
  Nanobody or Nanobody fragment
RTVGTGSLFDY

SEQ ID NO: 999 - protein, 16 aa, Artificial
  Nanobody or Nanobody fragment
ALGGGSSWCTTYEYDA

SEQ ID NO: 1000 - protein, 15 aa, Artificial
  Nanobody or Nanobody fragment
AVAAGTVGAYTLRNY

SEQ ID NO: 1001 - protein, 15 aa, Artificial
  Nanobody or Nanobody fragment
VIASNSGRSYDLRNY

SEQ ID NO: 1002 - protein, 15 aa, Artificial
  Nanobody or Nanobody fragment
NIVTYDRGRTTVKNY

SEQ ID NO: 1003 - protein, 8 aa, Artificial
  Nanobody or Nanobody fragment
KGTDRRSY

SEQ ID NO: 1004 - protein, 16 aa, Artificial
  Nanobody or Nanobody fragment
  misc_feature (12)..(12): Xaa can be any naturally occurring amino acid
YRAIGHFCTDYXDFVS

SEQ ID NO: 1005 - protein, 14 aa, Artificial
  Nanobody or Nanobody fragment
ANPNTGWQRPHRAS

SEQ ID NO: 1006 - protein, 14 aa, Artificial
  Nanobody or Nanobody fragment
ANPNTGWQRPHRAS

SEQ ID NO: 1007 - protein, 14 aa, Artificial
  Nanobody or Nanobody fragment
ANPNTGWQRPHRAS

SEQ ID NO: 1008 - protein, 14 aa, Artificial
  Nanobody or Nanobody fragment
AMQDSAWLRPHRAS

SEQ ID NO: 1009 - protein, 14 aa, Artificial
  Nanobody or Nanobody fragment
ANPNTGWQRPHRAS

SEQ ID NO: 1010 - protein, 14 aa, Artificial
  Nanobody or Nanobody fragment
ANPNTGWQRPHRAS

SEQ ID NO: 1011 - protein, 10 aa, Artificial
  Nanobody or Nanobody fragment
STLRTGWFTG

SEQ ID NO: 1012 - protein, 10 aa, Artificial
  Nanobody or Nanobody fragment
STLRTGWFTG

SEQ ID NO: 1013 - protein, 10 aa, Artificial
  Nanobody or Nanobody fragment
STLRTGWFTG

SEQ ID NO: 1014 - protein, 10 aa, Artificial
  Nanobody or Nanobody fragment
STLRTGWFTG

SEQ ID NO: 1015 - protein, 10 aa, Artificial
  Nanobody or Nanobody fragment
STARTGWLRA

SEQ ID NO: 1016 - protein, 10 aa, Artificial
  Nanobody or Nanobody fragment
  misc_feature (9)..(9): Xaa can be any naturally occurring amino acid
STARTGWLXP

SEQ ID NO: 1017 - protein, 10 aa, Artificial
  Nanobody or Nanobody fragment
STLRTGWLMG

SEQ ID NO: 1018 - protein, 10 aa, Artificial
  Nanobody or Nanobody fragment
STLRTGWLKG

SEQ ID NO: 1019 - protein, 10 aa, Artificial
  Nanobody or Nanobody fragment
STLRTGWFMG

SEQ ID NO: 1020 - protein, 10 aa, Artificial
  Nanobody or Nanobody fragment
STLRTGWLMG

SEQ ID NO: 1021 - protein, 10 aa, Artificial
  Nanobody or Nanobody fragment
STLRTGWLMG

SEQ ID NO: 1022 - protein, 10 aa, Artificial
  Nanobody or Nanobody fragment
STLRTGWLMG

SEQ ID NO: 1023 - protein, 10 aa, Artificial
  Nanobody or Nanobody fragment
STLRTGWLPG

SEQ ID NO: 1024 - protein, 10 aa, Artificial
  Nanobody or Nanobody fragment
STARTGWLRA

SEQ ID NO: 1025 - protein, 10 aa, Artificial
  Nanobody or Nanobody fragment
STLRTGWLMG

SEQ ID NO: 1026 - protein, 7 aa, Artificial
  Nanobody or Nanobody fragment
HTYTDNL

SEQ ID NO: 1027 - protein, 7 aa, Artificial
  Nanobody or Nanobody fragment
HTYTDNL

SEQ ID NO: 1028 - protein, 7 aa, Artificial
  Nanobody or Nanobody fragment
HTYTDNL

SEQ ID NO: 1029 - protein, 7 aa, Artificial
  Nanobody or Nanobody fragment
HTYTDNL

SEQ ID NO: 1030 - protein, 7 aa, Artificial
  Nanobody or Nanobody fragment
HTYTDNL

SEQ ID NO: 1031 - protein, 7 aa, Artificial
  Nanobody or Nanobody fragment
HTYTDNL

SEQ ID NO: 1032 - protein, 7 aa, Artificial
  Nanobody or Nanobody fragment
HTYTDSL

SEQ ID NO: 1033 - protein, 7 aa, Artificial
  Nanobody or Nanobody fragment
HTYTDNL

SEQ ID NO: 1034 - protein, 7 aa, Artificial
  Nanobody or Nanobody fragment
HTYTDNL

SEQ ID NO: 1035 - protein, 7 aa, Artificial
  Nanobody or Nanobody fragment
HTYTDNL

SEQ ID NO: 1036 - protein, 7 aa, Artificial
  Nanobody or Nanobody fragment
HTYTDNL

SEQ ID NO: 1037 - protein, 7 aa, Artificial
  Nanobody or Nanobody fragment
HTYTDNL

SEQ ID NO: 1038 - protein, 7 aa, Artificial
  Nanobody or Nanobody fragment
HTYTDNL

SEQ ID NO: 1039 - protein, 7 aa, Artificial
  Nanobody or Nanobody fragment
HTYTDNL

SEQ ID NO: 1040 - protein, 7 aa, Artificial
  Nanobody or Nanobody fragment
HTYTDNL

SEQ ID NO: 1041 - protein, 7 aa, Artificial
  Nanobody or Nanobody fragment
HTYTDNL

SEQ ID NO: 1042 - protein, 7 aa, Artificial
  Nanobody or Nanobody fragment
ARGPDVY

SEQ ID NO: 1043 - protein, 7 aa, Artificial
  Nanobody or Nanobody fragment
ARGPDVY

SEQ ID NO: 1044 - protein, 7 aa, Artificial
  Nanobody or Nanobody fragment
EGWYQGY

SEQ ID NO: 1045 - protein, 7 aa, Artificial
  Nanobody or Nanobody fragment
  misc_feature (1)..(1): Xaa can be any naturally occurring amino acid
XGWYNGY

SEQ ID NO: 1046 - protein, 7 aa, Artificial
  Nanobody or Nanobody fragment
EGWYQGY

SEQ ID NO: 1047 - protein, 9 aa, Artificial
  Nanobody or Nanobody fragment
ADREMGWAY

SEQ ID NO: 1048 - protein, 9 aa, Artificial
  Nanobody or Nanobody fragment
  misc_feature (1)..(1): Xaa can be any naturally occurring amino acid
  misc_feature (4)..(4): Xaa can be any naturally occurring amino acid
  misc_feature (7)..(7): Xaa can be any naturally occurring amino acid
XDRXMGXAY

SEQ ID NO: 1049 - protein, 14 aa, Artificial
  Nanobody or Nanobody fragment
KVIVMGAGMDDNDF

SEQ ID NO: 1050 - protein, 7 aa, Artificial
  Nanobody or Nanobody fragment
YWGGNVY

SEQ ID NO: 1051 - protein, 11 aa, Artificial
  Nanobody or Nanobody fragment
RTLQLGALRDY

SEQ ID NO: 1052 - protein, 12 aa, Artificial
  Nanobody or Nanobody fragment
NVETTRGLTKNY

SEQ ID NO: 1053 - protein, 8 aa, Artificial
  Nanobody or Nanobody fragment
ADSGPWRY

SEQ ID NO: 1054 - protein, 7 aa, Artificial
  Nanobody or Nanobody fragment
VQFGRNY

SEQ ID NO: 1055 - protein, 7 aa, Artificial
  Nanobody or Nanobody fragment
VPTTSAY

SEQ ID NO: 1056 - protein, 7 aa, Artificial
  Nanobody or Nanobody fragment
VPTTSAY

SEQ ID NO: 1057 - protein, 7 aa, Artificial
  Nanobody or Nanobody fragment
VPTTSAY

SEQ ID NO: 1058 - protein, 6 aa, Artificial
  Nanobody or Nanobody fragment
ASQFAS

SEQ ID NO: 1059 - protein, 5 aa, Artificial
  Nanobody or Nanobody fragment
LDYDY

SEQ ID NO: 1060 - protein, 8 aa, Artificial
  Nanobody or Nanobody fragment
LPHYPTDS

SEQ ID NO: 1061 - protein, 8 aa, Artificial
  Nanobody or Nanobody fragment
IPHYTVDS

SEQ ID NO: 1062-1063 - skipped (2 entries)

SEQ ID NO: 1064 - protein, 5 aa, Artificial
  Nanobody or Nanobody fragment
LYSDY

SEQ ID NO: 1065 - protein, 12 aa, Artificial
  Nanobody or Nanobody fragment
ATRSRLGLQQNY

SEQ ID NO: 1066 - protein, 7 aa, Artificial
  Nanobody or Nanobody fragment
NPSDNPW

SEQ ID NO: 1067 - protein, 8 aa, Artificial
  Nanobody or Nanobody fragment
RAPTGSDN

SEQ ID NO: 1068 - protein, 4 aa, Artificial
  Nanobody or Nanobody fragment
PGAG

SEQ ID NO: 1069 - protein, 13 aa, Artificial
  Nanobody or Nanobody fragment
GRYGSTSDTLYDY

SEQ ID NO: 1070 - protein, 13 aa, Artificial
  Nanobody or Nanobody fragment
GRYGSTSDTLYDY

SEQ ID NO: 1071 - protein, 13 aa, Artificial
  Nanobody or Nanobody fragment
GRYGSTADTLYDY

SEQ ID NO: 1072 - protein, 13 aa, Artificial
  Nanobody or Nanobody fragment
GRYGSTSDTLYDY

SEQ ID NO: 1073 - protein, 13 aa, Artificial
  Nanobody or Nanobody fragment
GRYGSTSDTLYDY

SEQ ID NO: 1074 - protein, 13 aa, Artificial
  Nanobody or Nanobody fragment
GRYGSTSDTLYDY

SEQ ID NO: 1075 - protein, 11 aa, Artificial
  Nanobody or Nanobody fragment
KDWPPNYKNDY

SEQ ID NO: 1076 - protein, 11 aa, Artificial
  Nanobody or Nanobody fragment
KDWPPNYTNDY

SEQ ID NO: 1077 - protein, 11 aa, Artificial
  Nanobody or Nanobody fragment
FSPRESSGNTY

SEQ ID NO: 1078 - protein, 16 aa, Artificial
  Nanobody or Nanobody fragment
GGRRWNTRKDSSQYDY

SEQ ID NO: 1079 - protein, 15 aa, Artificial
  Nanobody or Nanobody fragment
VINRRGDGRNWSREY

SEQ ID NO: 1080 - protein, 10 aa, Artificial
  Nanobody or Nanobody fragment
RNFEGRRVDY

SEQ ID NO: 1081 - protein, 7 aa, Artificial
  Nanobody or Nanobody fragment
AWAGVEY

SEQ ID NO: 1082 - protein, 7 aa, Artificial
  Nanobody or Nanobody fragment
LYRNAIY

SEQ ID NO: 1083 - protein, 21 aa, Artificial
  Nanobody or Nanobody fragment
  misc_feature (18)..(18): Xaa can be any naturally occurring amino acid
TQIGRPRGDKGANRYCSXSRD

SEQ ID NO: 1084 - protein, 4 aa, Artificial
  Nanobody or Nanobody fragment
PGAG

SEQ ID NO: 1085 - protein, 10 aa, Artificial
  Nanobody or Nanobody fragment
TTPLPYRRDF

SEQ ID NO: 1086 - skipped

SEQ ID NO: 1087 - protein, 19 aa, Artificial
  Nanobody or Nanobody fragment
BSRGPYNSNWHQSSVSYDY

SEQ ID NO: 1088 - protein, 19 aa, Artificial
  Nanobody or Nanobody fragment
BTRGPYNSNWAQSSVSYDG

SEQ ID NO: 1089 - protein, 19 aa, Artificial
  Nanobody or Nanobody fragment
BTRGPYNSNWAQSSVSYDY

SEQ ID NO: 1090 - protein, 19 aa, Artificial
  Nanobody or Nanobody fragment
BSRGPYNSNWHQSSVSYDY

SEQ ID NO: 1091 - protein, 19 aa, Artificial
  Nanobody or Nanobody fragment
DTRGPYNSNWAQSSVSYDT

SEQ ID NO: 1092 - protein, 19 aa, Artificial
  Nanobody or Nanobody fragment
DTRGPYNSNWAQSSVSYDG

SEQ ID NO: 1093 - protein, 19 aa, Artificial
  Nanobody or Nanobody fragment
DTRGPYNSNWAQSSVSYDG

SEQ ID NO: 1094 - protein, 19 aa, Artificial
  Nanobody or Nanobody fragment
BTRGPYNSNWHQSSVSYDA

SEQ ID NO: 1095 - protein, 19 aa, Artificial
  Nanobody or Nanobody fragment
BTRGPYNSNWAQSSVSYNY

SEQ ID NO: 1096 - protein, 19 aa, Artificial
  Nanobody or Nanobody fragment
BSRGPYNSNWHQSSVSYDY

SEQ ID NO: 1097 - protein, 19 aa, Artificial
  Nanobody or Nanobody fragment
BSRGPYNSNWHQSSVSYDY

SEQ ID NO: 1098 - protein, 19 aa, Artificial
  Nanobody or Nanobody fragment
BTRGPYNSNWAQSSVSYDY

SEQ ID NO: 1099 - protein, 19 aa, Artificial
  Nanobody or Nanobody fragment
BTRGPYNSNWAQSSVSYDY

SEQ ID NO: 1100 - protein, 19 aa, Artificial
  Nanobody or Nanobody fragment
DSRGPYNSNWHQSSVSYDY

SEQ ID NO: 1101 - protein, 19 aa, Artificial
  Nanobody or Nanobody fragment
BSRGPYNSNWHQSSVSYDY

SEQ ID NO: 1102 - protein, 19 aa, Artificial
  Nanobody or Nanobody fragment
DSRGPYNSNWHQSSVSYDY

SEQ ID NO: 1103 - protein, 19 aa, Artificial
  Nanobody or Nanobody fragment
BSRGPYNSNWHQSSVSYDY

SEQ ID NO: 1104 - protein, 14 aa, Artificial
  Nanobody or Nanobody fragment
RGIIARWGSAPGNY

SEQ ID NO: 1105 - protein, 14 aa, Artificial
  Nanobody or Nanobody fragment
RGIIARWGSAPGNY

SEQ ID NO: 1106 - protein, 11 aa, Artificial
  Nanobody or Nanobody fragment
TCVVNPEGYDF

SEQ ID NO: 1107 - protein, 11 aa, Artificial
  Nanobody or Nanobody fragment
GPDGLGGQDDY

SEQ ID NO: 1108 - protein, 4 aa, Artificial
  Nanobody or Nanobody fragment
PTYG

SEQ ID NO: 1109 - protein, 6 aa, Artificial
  Nanobody or Nanobody fragment
RSWRNY

SEQ ID NO: 1110 - protein, 21 aa, Artificial
  Nanobody or Nanobody fragment
SANRDLSLWVSTAYRSTGLWY

SEQ ID NO: 1111 - protein, 15 aa, Artificial
  Nanobody or Nanobody fragment
DRRGYIETMSVNYDY

SEQ ID NO: 1112 - protein, 11 aa, Artificial
  Nanobody or Nanobody fragment
QGYFGSTWINY

SEQ ID NO: 1113 - protein, 11 aa, Artificial
  Nanobody or Nanobody fragment
QGYFGSTWINY

SEQ ID NO: 1114 - protein, 11 aa, Artificial
  Nanobody or Nanobody fragment
QGYFGSTWINY

SEQ ID NO: 1115 - protein, 11 aa, Artificial
  Nanobody or Nanobody fragment
QGYFGSTWINY

SEQ ID NO: 1116 - protein, 11 aa, Artificial
  Nanobody or Nanobody fragment
SGTETWYDRTY

SEQ ID NO: 1117 - protein, 11 aa, Artificial
  Nanobody or Nanobody fragment
SGTETWYDRTY

SEQ ID NO: 1118 - protein, 12 aa, Artificial
  Nanobody or Nanobody fragment
DKDGVIGYSVGY

SEQ ID NO: 1119 - protein, 12 aa, Artificial
  Nanobody or Nanobody fragment
BKGGVIGYSEGY

SEQ ID NO: 1120 - protein, 12 aa, Artificial
  Nanobody or Nanobody fragment
BKGGVIGYSVGY

SEQ ID NO: 1121 - protein, 8 aa, Artificial
  Nanobody or Nanobody fragment
LSWPAGDY

SEQ ID NO: 1122 - protein, 8 aa, Artificial
  Nanobody or Nanobody fragment
LSWPAGDY

SEQ ID NO: 1123 - protein, 13 aa, Artificial
  Nanobody or Nanobody fragment
VRYIGGNYFPFDS

SEQ ID NO: 1124 - protein, 13 aa, Artificial
  Nanobody or Nanobody fragment
VRYTGGNYFPFDS

SEQ ID NO: 1125 - protein, 12 aa, Artificial
  Nanobody or Nanobody fragment
LRNYRYFGDMDY

SEQ ID NO: 1126 - protein, 12 aa, Artificial
  Nanobody or Nanobody fragment
LRNYRYFGDMDY

SEQ ID NO: 1127 - protein, 15 aa, Artificial
  Nanobody or Nanobody fragment
RRTFTRSSNRNEYAD

SEQ ID NO: 1128 - protein, 13 aa, Artificial
  Nanobody or Nanobody fragment
BSPPYGMGSDLGY

SEQ ID NO: 1129 - protein, 12 aa, Artificial
  Nanobody or Nanobody fragment
KRVGQSWFDSGY

SEQ ID NO: 1130 - protein, 15 aa, Artificial
  Nanobody or Nanobody fragment
  misc_feature (11)..(11): Xaa can be any naturally occurring amino acid
AIVSSRWGAEXTNDY

SEQ ID NO: 1131 - protein, 13 aa, Artificial
  Nanobody or Nanobody fragment
KTLTAWSTSTGDY

SEQ ID NO: 1132 - protein, 19 aa, Artificial
  Nanobody or Nanobody fragment
RRGGSYYFCDPLTVYEYDY

SEQ ID NO: 1133 - protein, 16 aa, Artificial
  Nanobody or Nanobody fragment
RKSYTDYDPPRWDYDT

SEQ ID NO: 1134 - protein, 6 aa, Artificial
  Nanobody or Nanobody fragment
LSRPWS

SEQ ID NO: 1135 - protein, 8 aa, Artificial
  Nanobody or Nanobody fragment
NRGSYGTY

SEQ ID NO: 1136 - protein, 13 aa, Artificial
  Nanobody or Nanobody fragment
SSVLGRSPALYDL

SEQ ID NO: 1137 - protein, 17 aa, Artificial
  Nanobody or Nanobody fragment
DARLYSPLPRRSSAYDY

SEQ ID NO: 1138 - protein, 17 aa, Artificial
  Nanobody or Nanobody fragment
VKRAPKQYCSDYEAYDY

SEQ ID NO: 1139 - protein, 11 aa, Artificial
  Nanobody or Nanobody fragment
RVIVPGGFRDY

SEQ ID NO: 1140 - protein, 10 aa, Artificial
  Nanobody or Nanobody fragment
PPYGSSCPLV

SEQ ID NO: 1141 - protein, 10 aa, Artificial
  Nanobody or Nanobody fragment
HIMWPTVRDY

SEQ ID NO: 1142 - protein, 18 aa, Artificial
  Nanobody or Nanobody fragment
QTAGTSIGCHISIGWYDY

SEQ ID NO: 1143 - protein, 19 aa, Artificial
  Nanobody or Nanobody fragment
ALRTVLAGTPTCDRYEYDY

SEQ ID NO: 1144 - protein, 10 aa, Artificial
  Nanobody or Nanobody fragment
HIMWPTVRDY

SEQ ID NO: 1145 - protein, 15 aa, Artificial
  Nanobody or Nanobody fragment
ARSGVPSSRPTDYDY

SEQ ID NO: 1146 - protein, 11 aa, Artificial
  Nanobody or Nanobody fragment
YGQGTQVTVSS

SEQ ID NO: 1147 - protein, 11 aa, Artificial
  Nanobody or Nanobody fragment
YGQGTQVTVSS

SEQ ID NO: 1148 - protein, 11 aa, Artificial
  Nanobody or Nanobody fragment
YGQGTQVTVSS

SEQ ID NO: 1149 - protein, 11 aa, Artificial
  Nanobody or Nanobody fragment
YGQGTQVTVSS

SEQ ID NO: 1150 - protein, 11 aa, Artificial
  Nanobody or Nanobody fragment
YGQGTQVTVSS

SEQ ID NO: 1151 - protein, 11 aa, Artificial
  Nanobody or Nanobody fragment
WGQGTQVTVSS

SEQ ID NO: 1152 - protein, 11 aa, Artificial
  Nanobody or Nanobody fragment
WGQGTQVTVSS

SEQ ID NO: 1153 - protein, 11 aa, Artificial
  Nanobody or Nanobody fragment
WGQGTQVTVSS

SEQ ID NO: 1154 - protein, 11 aa, Artificial
  Nanobody or Nanobody fragment
WGQGTQVTVSS

SEQ ID NO: 1155 - protein, 11 aa, Artificial
  Nanobody or Nanobody fragment
WGQGTQVTVSS

SEQ ID NO: 1156 - protein, 11 aa, Artificial
  Nanobody or Nanobody fragment
WGQGTQVTVSS

SEQ ID NO: 1157 - protein, 11 aa, Artificial
  Nanobody or Nanobody fragment
WGPGTQVTVSS

SEQ ID NO: 1158 - protein, 11 aa, Artificial
  Nanobody or Nanobody fragment
WGPGTQVTVSS

SEQ ID NO: 1159 - protein, 11 aa, Artificial
  Nanobody or Nanobody fragment
WGQGTQVTVSS

SEQ ID NO: 1160 - protein, 11 aa, Artificial
  Nanobody or Nanobody fragment
WGQGTQVTVSS

SEQ ID NO: 1161 - protein, 11 aa, Artificial
  Nanobody or Nanobody fragment
RGQGTQVTVSS

SEQ ID NO: 1162 - protein, 11 aa, Artificial
  Nanobody or Nanobody fragment
RGQGTQVTVSS

SEQ ID NO: 1163 - protein, 11 aa, Artificial
  Nanobody or Nanobody fragment
RGQGTQVTVSS

SEQ ID NO: 1164 - protein, 11 aa, Artificial
  Nanobody or Nanobody fragment
WGQGTQVTVSS

SEQ ID NO: 1165 - protein, 11 aa, Artificial
  Nanobody or Nanobody fragment
WGQGTQVTVSS

SEQ ID NO: 1166 - protein, 11 aa, Artificial
  Nanobody or Nanobody fragment
WGQGTQVTVSS

SEQ ID NO: 1167 - protein, 11 aa, Artificial
  Nanobody or Nanobody fragment
WGQGTQVTVSS

SEQ ID NO: 1168 - protein, 11 aa, Artificial
  Nanobody or Nanobody fragment
WGQGTQVTVSS

SEQ ID NO: 1169 - protein, 11 aa, Artificial
  Nanobody or Nanobody fragment
WGQGTQVTVSS

SEQ ID NO: 1170 - protein, 11 aa, Artificial
  Nanobody or Nanobody fragment
WGQGTQVTVSS

SEQ ID NO: 1171 - protein, 11 aa, Artificial
  Nanobody or Nanobody fragment
WGQGTQVTVSS

SEQ ID NO: 1172 - protein, 11 aa, Artificial
  Nanobody or Nanobody fragment
WGQGTQVTVSS

SEQ ID NO: 1173 - protein, 11 aa, Artificial
  Nanobody or Nanobody fragment
WGQGTQVTVSS

SEQ ID NO: 1174 - protein, 11 aa, Artificial
  Nanobody or Nanobody fragment
WGQGTQVTVSS

SEQ ID NO: 1175 - protein, 11 aa, Artificial
  Nanobody or Nanobody fragment
WGQGTQVTVSS

SEQ ID NO: 1176 - protein, 11 aa, Artificial
  Nanobody or Nanobody fragment
WGQGTQVTVSS

SEQ ID NO: 1177 - protein, 11 aa, Artificial
  Nanobody or Nanobody fragment
WGQGTQVTVSS

SEQ ID NO: 1178 - protein, 11 aa, Artificial
  Nanobody or Nanobody fragment
WGQGTQVTVSS

SEQ ID NO: 1179 - protein, 11 aa, Artificial
  Nanobody or Nanobody fragment
WGQGTQVTVSS

SEQ ID NO: 1180 - protein, 11 aa, Artificial
  Nanobody or Nanobody fragment
WGQGTQVTVSS

SEQ ID NO: 1181 - protein, 11 aa, Artificial
  Nanobody or Nanobody fragment
WGQGTQVTVSS

SEQ ID NO: 1182 - protein, 11 aa, Artificial
  Nanobody or Nanobody fragment
WGQGTQVTVSS

SEQ ID NO: 1183 - protein, 11 aa, Artificial
  Nanobody or Nanobody fragment
WGQGTQVTVSS

SEQ ID NO: 1184 - protein, 11 aa, Artificial
  Nanobody or Nanobody fragment
WGQGTQVTVSS

SEQ ID NO: 1185 - protein, 11 aa, Artificial
  Nanobody or Nanobody fragment
WGQGTQVTVSS

SEQ ID NO: 1186 - protein, 11 aa, Artificial
  Nanobody or Nanobody fragment
WGQGTQVTVSS

SEQ ID NO: 1187 - protein, 11 aa, Artificial
  Nanobody or Nanobody fragment
WGQGTQVTVSS

SEQ ID NO: 1188 - protein, 11 aa, Artificial
  Nanobody or Nanobody fragment
WGQGTQVTVSS

SEQ ID NO: 1189 - protein, 11 aa, Artificial
  Nanobody or Nanobody fragment
WGQGTQVTVSS

SEQ ID NO: 1190 - protein, 11 aa, Artificial
  Nanobody or Nanobody fragment
WGQGTQVTVSS

SEQ ID NO: 1191 - protein, 11 aa, Artificial
  Nanobody or Nanobody fragment
WGQGTQVTVSS

SEQ ID NO: 1192 - protein, 11 aa, Artificial
  Nanobody or Nanobody fragment
WGQGTQVTVSS

SEQ ID NO: 1193 - protein, 11 aa, Artificial
  Nanobody or Nanobody fragment
WGQGTQVTVSS

SEQ ID NO: 1194 - protein, 11 aa, Artificial
  Nanobody or Nanobody fragment
WGQGTQVTVSS

SEQ ID NO: 1195 - protein, 11 aa, Artificial
  Nanobody or Nanobody fragment
WGQGTQVTVSS

SEQ ID NO: 1196 - protein, 11 aa, Artificial
  Nanobody or Nanobody fragment
WGQGTQVTVSS

SEQ ID NO: 1197 - protein, 11 aa, Artificial
  Nanobody or Nanobody fragment
WGQGTQVTVSS

SEQ ID NO: 1198 - protein, 11 aa, Artificial
  Nanobody or Nanobody fragment
WGQGTQVTVSS

SEQ ID NO: 1199 - protein, 11 aa, Artificial
  Nanobody or Nanobody fragment
WGQGTQVTVSS

SEQ ID NO: 1200 - protein, 11 aa, Artificial
  Nanobody or Nanobody fragment
WGQGTQVTVSS

SEQ ID NO: 1201 - protein, 11 aa, Artificial
  Nanobody or Nanobody fragment
WGQGTQVTVSS

SEQ ID NO: 1202 - protein, 11 aa, Artificial
  Nanobody or Nanobody fragment
WGQGTQVTVSS

SEQ ID NO: 1203 - protein, 11 aa, Artificial
  Nanobody or Nanobody fragment
WGQGTQVTVSS

SEQ ID NO: 1204 - protein, 11 aa, Artificial
  Nanobody or Nanobody fragment
WGQGTQVTVSS

SEQ ID NO: 1205 - protein, 11 aa, Artificial
  Nanobody or Nanobody fragment
WGQGTQVTVSS

SEQ ID NO: 1206 - protein, 11 aa, Artificial
  Nanobody or Nanobody fragment
WGQGTQVTVSS

SEQ ID NO: 1207 - protein, 11 aa, Artificial
  Nanobody or Nanobody fragment
WGQGTQVTVSS

SEQ ID NO: 1208 - protein, 11 aa, Artificial
  Nanobody or Nanobody fragment
WGQGTQVTVSS

SEQ ID NO: 1209 - protein, 11 aa, Artificial
  Nanobody or Nanobody fragment
WGQGTQVTVSS

SEQ ID NO: 1210 - protein, 11 aa, Artificial
  Nanobody or Nanobody fragment
WGQGTQVTVSS

SEQ ID NO: 1211 - protein, 11 aa, Artificial
  Nanobody or Nanobody fragment
WGQGTQVTVSS

SEQ ID NO: 1212 - protein, 11 aa, Artificial
  Nanobody or Nanobody fragment
WGQGTQVTVSS

SEQ ID NO: 1213 - protein, 11 aa, Artificial
  Nanobody or Nanobody fragment
WGQGTQVTVSS

SEQ ID NO: 1214 - protein, 11 aa, Artificial
  Nanobody or Nanobody fragment
WGQGTQVTVSS

SEQ ID NO: 1215 - protein, 11 aa, Artificial
  Nanobody or Nanobody fragment
WGQGTQVTVSS

SEQ ID NO: 1216 - protein, 11 aa, Artificial
  Nanobody or Nanobody fragment
WGQGTQVTVSS

SEQ ID NO: 1217 - protein, 11 aa, Artificial
  Nanobody or Nanobody fragment
WGQGTQVTVSS

SEQ ID NO: 1218 - protein, 11 aa, Artificial
  Nanobody or Nanobody fragment
WGQGTQVTVSS

SEQ ID NO: 1219 - protein, 11 aa, Artificial
  Nanobody or Nanobody fragment
FGQGTQVTVSS

SEQ ID NO: 1220 - protein, 11 aa, Artificial
  Nanobody or Nanobody fragment
WGQGTQVTVSS

SEQ ID NO: 1221 - protein, 11 aa, Artificial
  Nanobody or Nanobody fragment
WGQGTQVTVSS

SEQ ID NO: 1222 - protein, 11 aa, Artificial
  Nanobody or Nanobody fragment
WGQGIQVTVSS

SEQ ID NO: 1223 - protein, 11 aa, Artificial
  Nanobody or Nanobody fragment
WGQGSQVTVSS

SEQ ID NO: 1224 - protein, 11 aa, Artificial
  Nanobody or Nanobody fragment
WGQGTQVTVSS

SEQ ID NO: 1225 - protein, 11 aa, Artificial
  Nanobody or Nanobody fragment
WGPGTQVTVSS

SEQ ID NO: 1226 - protein, 11 aa, Artificial
  Nanobody or Nanobody fragment
WGPGTQVTVSS

SEQ ID NO: 1227 - protein, 11 aa, Artificial
  Nanobody or Nanobody fragment
WGPGTQVTVSS

SEQ ID NO: 1228 - protein, 11 aa, Artificial
  Nanobody or Nanobody fragment
WGQGTQVTVSS

SEQ ID NO: 1229 - protein, 11 aa, Artificial
  Nanobody or Nanobody fragment
WGQGTQVTVSS

SEQ ID NO: 1230 - protein, 11 aa, Artificial
  Nanobody or Nanobody fragment
WGQGTQVTVSS

SEQ ID NO: 1231 - protein, 11 aa, Artificial
  Nanobody or Nanobody fragment
WGQGTQVTVSS

SEQ ID NO: 1232 - protein, 11 aa, Artificial
  Nanobody or Nanobody fragment
WGQGTQVTVSS

SEQ ID NO: 1233 - protein, 11 aa, Artificial
  Nanobody or Nanobody fragment
WGQGTQVTVSS

SEQ ID NO: 1234 - protein, 11 aa, Artificial
  Nanobody or Nanobody fragment
WGKGTQVTVSS

SEQ ID NO: 1235 - protein, 11 aa, Artificial
  Nanobody or Nanobody fragment
WGQGTQVTVSS

SEQ ID NO: 1236 - protein, 11 aa, Artificial
  Nanobody or Nanobody fragment
LGQGTQVTVSS

SEQ ID NO: 1237 - protein, 11 aa, Artificial
  Nanobody or Nanobody fragment
WGQGTQVTVSS

SEQ ID NO: 1238 - protein, 11 aa, Artificial
  Nanobody or Nanobody fragment
RGQGTQVTVSS

SEQ ID NO: 1239 - protein, 11 aa, Artificial
  Nanobody or Nanobody fragment
WGQGTQVTVSS

SEQ ID NO: 1240 - protein, 11 aa, Artificial
  Nanobody or Nanobody fragment
WGQGTQVTVSS

SEQ ID NO: 1241 - protein, 11 aa, Artificial
  Nanobody or Nanobody fragment
WGQGTQVTVSS

SEQ ID NO: 1242 - protein, 11 aa, Artificial
  Nanobody or Nanobody fragment
WGQGTQVTVSS

SEQ ID NO: 1243 - protein, 11 aa, Artificial
  Nanobody or Nanobody fragment
WGQGTQVTVSS

SEQ ID NO: 1244 - protein, 11 aa, Artificial
  Nanobody or Nanobody fragment
WGQGTQVTVSS

SEQ ID NO: 1245 - protein, 11 aa, Artificial
  Nanobody or Nanobody fragment
WGQGTQVTVSS

SEQ ID NO: 1246 - protein, 11 aa, Artificial
  Nanobody or Nanobody fragment
WGQGTQVTVSS

SEQ ID NO: 1247 - protein, 11 aa, Artificial
  Nanobody or Nanobody fragment
WGQGTQVTVSS

SEQ ID NO: 1248 - protein, 11 aa, Artificial
  Nanobody or Nanobody fragment
WGQGTQVTVSS

SEQ ID NO: 1249 - protein, 11 aa, Artificial
  Nanobody or Nanobody fragment
WGQGTQVTVSS

SEQ ID NO: 1250 - protein, 11 aa, Artificial
  Nanobody or Nanobody fragment
WGQGTQVTVSS

SEQ ID NO: 1251 - protein, 11 aa, Artificial
  Nanobody or Nanobody fragment
WGQGTQVTVSS

SEQ ID NO: 1252 - protein, 11 aa, Artificial
  Nanobody or Nanobody fragment
WGQGTQVTVSS

SEQ ID NO: 1253 - protein, 11 aa, Artificial
  Nanobody or Nanobody fragment
RGQGTQVTVSS

SEQ ID NO: 1254 - protein, 11 aa, Artificial
  Nanobody or Nanobody fragment
RGQGTQVTVSS

SEQ ID NO: 1255 - protein, 11 aa, Artificial
  Nanobody or Nanobody fragment
WGQGTQVTVSS

SEQ ID NO: 1256 - protein, 11 aa, Artificial
  Nanobody or Nanobody fragment
WGQGTQVTVSS

SEQ ID NO: 1257 - protein, 11 aa, Artificial
  Nanobody or Nanobody fragment
WGQGTQVTVSS

SEQ ID NO: 1258 - protein, 11 aa, Artificial
  Nanobody or Nanobody fragment
WGQGTQVTVSS

SEQ ID NO: 1259 - protein, 11 aa, Artificial
  Nanobody or Nanobody fragment
WGQGTQVTVSS

SEQ ID NO: 1260 - protein, 11 aa, Artificial
  Nanobody or Nanobody fragment
WGQGTQVTVSS

SEQ ID NO: 1261 - protein, 11 aa, Artificial
  Nanobody or Nanobody fragment
WGQGTQVTVSS

SEQ ID NO: 1262 - protein, 11 aa, Artificial
  Nanobody or Nanobody fragment
WGQGTQVTVSS

SEQ ID NO: 1263 - protein, 11 aa, Artificial
  Nanobody or Nanobody fragment
WGQGTQVTVSS

SEQ ID NO: 1264 - protein, 11 aa, Artificial
  Nanobody or Nanobody fragment
WGQGTQVTVSS

SEQ ID NO: 1265 - protein, 11 aa, Artificial
  Nanobody or Nanobody fragment
WGQGTQVTVSS

SEQ ID NO: 1266 - protein, 11 aa, Artificial
  Nanobody or Nanobody fragment
WGQGTQVTVSS

SEQ ID NO: 1267 - protein, 11 aa, Artificial
  Nanobody or Nanobody fragment
WGQGTQVTVSS

SEQ ID NO: 1268 - protein, 11 aa, Artificial
  Nanobody or Nanobody fragment
WGQGTQVTVSS

SEQ ID NO: 1269 - protein, 11 aa, Artificial
  Nanobody or Nanobody fragment
WGQGTQVTVSS

SEQ ID NO: 1270 - protein, 11 aa, Artificial
  Nanobody or Nanobody fragment
WGQGTQVTVSS

SEQ ID NO: 1271 - protein, 11 aa, Artificial
  Nanobody or Nanobody fragment
WGQGTQVTVSS

SEQ ID NO: 1272 - protein, 11 aa, Artificial
  Nanobody or Nanobody fragment
WGQGTQVTVSS

SEQ ID NO: 1273 - protein, 11 aa, Artificial
  Nanobody or Nanobody fragment
WGQGTQVTVSS

SEQ ID NO: 1274 - protein, 11 aa, Artificial
  Nanobody or Nanobody fragment
WGQGTQVTVSS

SEQ ID NO: 1275 - protein, 11 aa, Artificial
  Nanobody or Nanobody fragment
WGQGTQVTVSS

SEQ ID NO: 1276 - protein, 11 aa, Artificial
  Nanobody or Nanobody fragment
WGQGTQVTVSS

SEQ ID NO: 1277 - protein, 11 aa, Artificial
  Nanobody or Nanobody fragment
WGQGTQVTVSS

SEQ ID NO: 1278 - protein, 11 aa, Artificial
  Nanobody or Nanobody fragment
RGQGTQVTVSS

SEQ ID NO: 1279 - protein, 11 aa, Artificial
  Nanobody or Nanobody fragment
WGQGTQVTVSS

SEQ ID NO: 1280 - protein, 11 aa, Artificial
  Nanobody or Nanobody fragment
WGQGTQVTVSS

SEQ ID NO: 1281 - protein, 11 aa, Artificial
  Nanobody or Nanobody fragment
WGQGTQVTVSS

SEQ ID NO: 1282 - protein, 11 aa, Artificial
  Nanobody or Nanobody fragment
WGQGTQVTVSS

SEQ ID NO: 1283 - protein, 11 aa, Artificial
  Nanobody or Nanobody fragment
WGQGTQVTVSS

SEQ ID NO: 1284 - protein, 11 aa, Artificial
  Nanobody or Nanobody fragment
WGQGTQVTVSS

SEQ ID NO: 1285 - protein, 11 aa, Artificial
  Nanobody or Nanobody fragment
WGQGTQVTVSS

SEQ ID NO: 1286 - protein, 11 aa, Artificial
  Nanobody or Nanobody fragment
WGQGTQVTVSS

SEQ ID NO: 1287 - protein, 11 aa, Artificial
  Nanobody or Nanobody fragment
WGQGTQVTVSS

SEQ ID NO: 1288 - protein, 11 aa, Artificial
  Nanobody or Nanobody fragment
WGQGTQVTVSS

SEQ ID NO: 1289 - protein, 11 aa, Artificial
  Nanobody or Nanobody fragment
WGQGTQVTVSS

SEQ ID NO: 1290 - protein, 11 aa, Artificial
  Nanobody or Nanobody fragment
WGQGTQVTVSS

SEQ ID NO: 1291 - protein, 11 aa, Artificial
  Nanobody or Nanobody fragment
WGQGTQVTVSS

SEQ ID NO: 1292 - protein, 11 aa, Artificial
  Nanobody or Nanobody fragment
WDQGTQVTVSS

SEQ ID NO: 1293 - protein, 11 aa, Artificial
  Nanobody or Nanobody fragment
WGQGTQVTVSS

SEQ ID NO: 1294 - protein, 11 aa, Artificial
  Nanobody or Nanobody fragment
WGQGTQVTVSS

SEQ ID NO: 1295 - protein, 11 aa, Artificial
  Nanobody or Nanobody fragment
RGEGTLVTVSS

SEQ ID NO: 1296 - protein, 11 aa, Artificial
  Nanobody or Nanobody fragment
RGEGTLVTVSS

SEQ ID NO: 1297 - protein, 11 aa, Artificial
  Nanobody or Nanobody fragment
WGQGTQVTVSS

SEQ ID NO: 1298 - protein, 11 aa, Artificial
  Nanobody or Nanobody fragment
WGQGTQVTVSS

SEQ ID NO: 1299 - protein, 11 aa, Artificial
  Nanobody or Nanobody fragment
WGQGTQVTVSS

SEQ ID NO: 1300 - protein, 11 aa, Artificial
  Nanobody or Nanobody fragment
WGQGTQVTVSS

SEQ ID NO: 1301 - protein, 11 aa, Artificial
  Nanobody or Nanobody fragment
WGQGTQVTVSS

SEQ ID NO: 1302 - protein, 11 aa, Artificial
  Nanobody or Nanobody fragment
WGQGTQVTVSS

SEQ ID NO: 1303 - protein, 11 aa, Artificial
  Nanobody or Nanobody fragment
WGQGTQVTVSS

SEQ ID NO: 1304 - protein, 11 aa, Artificial
  Nanobody or Nanobody fragment
WGQGTQVTVSS

SEQ ID NO: 1305 - protein, 11 aa, Artificial
  Nanobody or Nanobody fragment
WGQGTQVTVSS

SEQ ID NO: 1306 - protein, 11 aa, Artificial
  Nanobody or Nanobody fragment
WGQGTQVTVSS

SEQ ID NO: 1307 - protein, 11 aa, Artificial
  Nanobody or Nanobody fragment
WGQGTQVTVSS

SEQ ID NO: 1308 - protein, 11 aa, Artificial
  Nanobody or Nanobody fragment
WGQETQVTVSS

SEQ ID NO: 1309 - protein, 11 aa, Artificial
  Nanobody or Nanobody fragment
WGQGTQVTVSS

SEQ ID NO: 1310 - protein, 11 aa, Artificial
  Nanobody or Nanobody fragment
WGQGTQVTVSS

SEQ ID NO: 1311 - protein, 11 aa, Artificial
  Nanobody or Nanobody fragment
WGQGTQVTVSS

SEQ ID NO: 1312 - protein, 11 aa, Artificial
  Nanobody or Nanobody fragment
WGQGTQVTVSS

SEQ ID NO: 1313 - protein, 11 aa, Artificial
  Nanobody or Nanobody fragment
WGQGTQVTVSS

SEQ ID NO: 1314 - protein, 11 aa, Artificial
  Nanobody or Nanobody fragment
WGQGTQVTVSS

SEQ ID NO: 1315 - protein, 11 aa, Artificial
  Nanobody or Nanobody fragment
WGQGTQVTVSS

SEQ ID NO: 1316 - protein, 126 aa, Artificial
  Nanobody or Nanobody fragment
EVQLVESGGGLVQPGGSLRLSCAASGFTLDYYNIGWFRQAPGEEREGVSCVSSSGGSTYYADSVKGRFTISRDNAKNTVYLQMNSLKPEDTAVYYCATLNLFTTCDGPWGYEYDYYGQGTQVTVSS

SEQ ID NO: 1317 - protein, 126 aa, Artificial
  Nanobody or Nanobody fragment
EVQLVESGGGLVQPGGSLRLSCAASGFTLDYYNIGWFRQAPGKEREGVSCVSSSGGSTYYADSVKGRFTISRDNAKNTVYLQMNSLKPEDTAVYYCATLNLFTTCDGPWGYEYDYYGQGTQVTVSS

SEQ ID NO: 1318 - protein, 126 aa, Artificial
  Nanobody or Nanobody fragment
  misc_feature (1)..(1): Xaa can be any naturally occurring amino acid
XVQLVESGGGLVQPGGSLRLSCAASGFTLDYYAIGWFRQAPGKEREGVSCISSSDGSTYYADSVKGRFTISRDNAKNTVYLQMNSLKPEDTAVYYCATLNLFTTCDGPWGYEYDYYGQGTQVTVSS

SEQ ID NO: 1319 - protein, 126 aa, Artificial
  Nanobody or Nanobody fragment
EVQLVESGGGLVQPGGSLRLSCAASGFTLDYYNIGWFRQAPGKEREGVSCVSDSGGSTYYADSVKGRFTISRDNAKNTVYLQMNSLKPEDTAVYYCATLNLFTTCDGPWGYEYDYYGQGTQVTVSS

SEQ ID NO: 1320 - protein, 126 aa, Artificial
  Nanobody or Nanobody fragment
EVQLVESGGGLVQPGGSLRLSCAASGFTLDSYNIGWFRQAPGEEREGVSCVSSSGGSTYYADSVKGRFTISRDNAKNTVYLQMNSLKPEDTAVYYCATLNLFTTCDGPWGYEYDYYGQGTQVTVSS

SEQ ID NO: 1321 - protein, 127 aa, Artificial
  Nanobody or Nanobody fragment
EVQLVESGGGLVQAGGSLRLSCAASGFTADDYAIGWFRQAPGKEREGVSCISSSDGSTFYADSVKGRFTISSDNAKNTVYLQMNSLKPEDTAVYYCAADPRFEPTLLCTDYDYEDYWGQGTQVTVSS

SEQ ID NO: 1322 - protein, 126 aa, Artificial
  Nanobody or Nanobody fragment
  misc_feature (101)..(101): Xaa can be any naturally occurring amino acid
EVQLVESGGGLVQPGGSLRLSCAASGFTFDDYAIGWFRQAPGKEREGVSCISSSDGSTFYANSVKDRFTVSSDNAKNTVYLQMNSLKPEDTAVYYCAABPXLSPQTYCTDYDYSYWGQGTQVTVSS

SEQ ID NO: 1323 - protein, 125 aa, Artificial
  Nanobody or Nanobody fragment
EVQLVESGGGLVQAGGSLRLSCAASGFTFDDYAIGWFRQAPGKEREGVSCISSSDGYTYYADSVKDRFTISSDDAKNTVYLQMNSLKPEDTAVYYCAATPRRFGWCSDYBEYDYWGQGTQVTVSS

SEQ ID NO: 1324 - protein, 125 aa, Artificial
  Nanobody or Nanobody fragment
EVQLVESGGGLVQAGGSLRLSCAASGFTFDDYAIGWFRQAPGKEREGVSCISSSDGYSFYANSVKGRFTISSDNAKNTVYLQMNSLKPEDTAVYYCAATPRRFGWCSDYDEYDYWGQGTQVTVSS

SEQ ID NO: 1325 - protein, 125 aa, Artificial
  Nanobody or Nanobody fragment
  misc_feature (13)..(13): Xaa can be any naturally occurring amino acid
  misc_feature (24)..(24): Xaa can be any naturally occurring amino acid
  misc_feature (28)..(28): Xaa can be any naturally occurring amino acid
  misc_feature (106)..(106): Xaa can be any naturally occurring amino acid
  misc_feature (111)..(111): Xaa can be any naturally occurring amino acid
EVQLVESGGGLVXAGGSLRLSCAXSGFXFDDYAIGWFRQAPGEEREGVSCISSSDGYTYYAHSVKDRFTISSDNAKNTMYLQMNSLKPEDTAVYYCAATPRRFGWXSDYDXYDYWGQGTQVTVSS

SEQ ID NO: 1326 - protein, 126 aa, Artificial
  Nanobody or Nanobody fragment
  misc_feature (1)..(1): Xaa can be any naturally occurring amino acid
  misc_feature (38)..(38): Xaa can be any naturally occurring amino acid
  misc_feature (72)..(72): Xaa can be any naturally occurring amino acid
  misc_feature (99)..(99): Xaa can be any naturally occurring amino acid
XVQLVESGGGLVQAGGSLRLSCAASGFTFDDYVIGWFXQAPGKEREGVSCISSSEGYTFYADSVKDRFTISXDNAKNTVSLQMNSLKPEDTAVYYCAAXRKIIGLWCSDYDNYDYWGQGTQVTVSS

SEQ ID NO: 1327 - protein, 119 aa, Artificial
  Nanobody or Nanobody fragment
EVQLVESGGGLVRAGGSLRLSCTASGNILNIASMGWYRQAPGKQRTWVARIRSDGTTSYQDAVKGRFTIAKDNAKNAGYLQMDNLKPEDTAVYYCNAAGSTIDGGFSSWGPGTQVTVSS

SEQ ID NO: 1328 - protein, 119 aa, Artificial
  Nanobody or Nanobody fragment
EVQLVESGGGLVRAGGSLRLSCTASGNILNIASMGWYRQALGKQRTWVARIRSDGTTSYQDAVKGRFTIAKDNAKNAGYLQMDNLKPEDTAVYYCNAAGSTIDGGFSSWGPGTQVTVSS

SEQ ID NO: 1329 - protein, 119 aa, Artificial
  Nanobody or Nanobody fragment
EVQLVESGGGLVQAGGSLRLSCAASGSGFNIVNAGWYRQGPEKQRELVARITSGGTTNYAESVKGRFTISRDNAKNTVYLQMNSLKPEDTAVYSCNARVIAPGRLDDIWGQGTQVTVSS

SEQ ID NO: 1330 - protein, 119 aa, Artificial
  Nanobody or Nanobody fragment
  misc_feature (3)..(3): Xaa can be any naturally occurring amino acid
EVXLVESGGGLVQAGGSLRLSCAASGSGFNIVNAGWYRQGPGKQREFVARITSGGTTNYAESVKGRFTISRDNAKNTVYLQMNSLKPEDTAVYSCNARVIAPGRLDDIWGQGTQVTVSS

SEQ ID NO: 1331 - protein, 126 aa, Artificial
  Nanobody or Nanobody fragment
EVQLVESGGGLVQPGGSLRLSCAASGFAFSSYAMSWVRQAPGKGVEWVSAINSGGGSTSYLNSVKGRFTISRDDAKNTLYLQMNSLKPEDTAVYYCAKPIYYSPNTYPPTSRYDYRGQGTQVTVSS

SEQ ID NO: 1332 - protein, 126 aa, Artificial
  Nanobody or Nanobody fragment
KVQLVESGGGLVQPGGSLRLSCAASGFAFSSYVMTWVRQAPGKGLEWVSSITSGGGYTSYLNSVKGRFTISRDDAKNTLYLQMNSLKPEDTAVYYCAKPTFYSPNMYPPTSRYDYRGQGTQVTVSS

SEQ ID NO: 1333 - protein, 126 aa, Artificial
  Nanobody or Nanobody fragment
EVQLVESGGGLVQPGGSLRLSCAASGFAFSSYVMTWVRQAPGKGLEWVSSITSGGGYTSYVNSVKGRFTISRDDAKNTLYLQMNSLKPEDTAVYYCAKPTFYSPNMYPPTSRYDYRGQGTQVTVSS

SEQ ID NO: 1334 - protein, 127 aa, Artificial
  Nanobody or Nanobody fragment
EVQLVESGGGLVQAGGSLRLSCAASGFTLDAYAIGWFRQAPGKEREGVSCISSSDGSTFYADSVKDRFTISSDNAKNTVYLQMNSLKPEDTAVYYCAADRRGKSEMYCTDYSYSDAWGQGTQVTVSS

SEQ ID NO: 1335 - protein, 127 aa, Artificial
  Nanobody or Nanobody fragment
  misc_feature (3)..(3): Xaa can be any naturally occurring amino acid
EVXLVESGGGLVQAGGSLRLSCAASGFTLDAYAIGWFRQAPGKEREGVSCISSSDGSRFYADSVKDRFTISSDNAKNTVYLQMNSLKPEDTAVYYCAADRRGKSEMYCTDYAYSDAWGQGTQVTVSS

SEQ ID NO: 1336 - protein, 119 aa, Artificial
  Nanobody or Nanobody fragment
EVQLVESGGGLVQAGGSLTLSCALSGGSSSIANSAWYRQAPGNQRELVARITSNDNTYYADSVKGRLTISKDNAKNTASLQMNSLKPEDTAVYYCFVRTVGTGSLFDYWGQGTQVTVSS

SEQ ID NO: 1337 - protein, 119 aa, Artificial
  Nanobody or Nanobody fragment
EVQLVESGGGLVQAGGSLTLSCALSGGSSSIANSAWYRQAPGNQRELVARITSNDNTYYADSVKGRFTISKDNAKNTASLQMNSLKPEDTAVYYCFVRTVGTGSLFDYWGQGTQVTVSS

SEQ ID NO: 1338 - protein, 119 aa, Artificial
  Nanobody or Nanobody fragment
EVQPVESGGGLVQAGGSLTLSCALSGGSSSIANSAWYRQAPGNQRELVARITSNDNTYYADSVKGRFTISKDNAKNTASLQMNSLKPEDTAVYYCFVRTVGTGSLFDYWGQGTQVTVSS

SEQ ID NO: 1339 - protein, 125 aa, Artificial
  Nanobody or Nanobody fragment
EVQLVESGGGLVQAGGSLRLSCAASGFTFDDYAIGWFRQAPGKEREGVSCISSSHGSTFYADSVKDRFTISSDNAKNTVYLQMNSLKPEDTAVYYCAAALGGGSSWCTTYEYDAWGQGTQVTVSS

SEQ ID NO: 1340 - protein, 123 aa, Artificial
  Nanobody or Nanobody fragment
EVQLVESGGGLVQSGGSLRLSCAASGSIVGISDMRWYRQAPGNQRELAASISRGGSTNYGDFVKGRFTISRDNAKNTVSLQMSSLEPEDTAVYYCNAAVAAGTVGAYTLRNYWGQGTQVTVSS

SEQ ID NO: 1341 - protein, 123 aa, Artificial
  Nanobody or Nanobody fragment
KVQLVESGGGLVQAGGSLRLTCAASGSILSVSTMTWYRQVLGTQRELVASITRSGGSNYADPVKGRFTIARDNAKNTMYLQMNSLKPEDTAIYYCNAVIASNSGRSYDLRNYWGQGTQVTVSS

SEQ ID NO: 1342 - protein, 123 aa, Artificial
  Nanobody or Nanobody fragment
EVQLVESGGGLVQPGGSLRLSCTASGSVFSIGNMGWYRQAPGKQRELVATITQAGSPNYSQSAKGRFTISRDVPKNTVSLQMNSLKPEDTAVYYCNGNIVTYDRGRTTVKNYWGQGTQVTVSS

SEQ ID NO: 1343 - protein, 111 aa, Artificial
  Nanobody or Nanobody fragment
EVQLVESGGGLVQPGGSLRLYCAAPGTMYSFIEMGWYRQAPGKQRELVAHITSGGSTKYADSVKGRFTISRDLSLQMNNLNPEDSAVYLCNMKGTDRRSYWGQGTQVTVSS

SEQ ID NO: 1344 - protein, 125 aa, Artificial
  Nanobody or Nanobody fragment
  misc_feature (1)..(1): Xaa can be any naturally occurring amino acid
  misc_feature (110)..(110): Xaa can be any naturally occurring amino acid
XVQLVESGGGLVQAGGSLRLSCAASGFTFDDYAIGWFRQAPGKEREGVSCISRSAGSKYYADSVKDRFTISSDNAKNTVSLQMNSLKPEDTAVYYCAAYRAIGHFCTDYXDFVSWGQGTQVTVSS

SEQ ID NO: 1345 - protein, 122 aa, Artificial
  Nanobody or Nanobody fragment
EVQLVESGGGLVQAGGSLRLSCTVSGSTGSINAMGWYRQAPGKQRELVAIIYSSGRIDYADSVKGRFTISRDNAKNTVYLQMNNLQPDDTAAYYCNAANPNTGWQRPHRASWGQGTQVTVSS

SEQ ID NO: 1346 - protein, 122 aa, Artificial
  Nanobody or Nanobody fragment
EVQLVESGGGVVQAGGSLRLSCTVSGSTGSINAMGWYRQAPGKQRELVAIIYSSGTIBYADSVKGRFTISRDNAKNTVYLQMNSLKPDDTAAYYCNAANPNTGWQRPHRASWGQGTQVTVSS

SEQ ID NO: 1347 - protein, 122 aa, Artificial
  Nanobody or Nanobody fragment
EVQLVESGRGLVQAGGSLRLSCTVSGSTGSINAMGWYRQAPGKQRELVAIIYSSGRIDYADSVKGRFTISRDNAKNTVBLQMNSLKPDDTAAYYCNAANPNTGWQRPHRASWGQGTQVTVSS

SEQ ID NO: 1348 - protein, 122 aa, Artificial
  Nanobody or Nanobody fragment
EVQLVESGGGLVQAGGSLRLSCTVSGSTGSINVMGWYRQAPGKQRELVAIIYSSGTLDYADSVKGRFTISRDNAKNTVYLQMNSLKPDDTAAYYCNAAMQDSAWLRPHRASWGQGTQVTVSS

SEQ ID NO: 1349 - protein, 122 aa, Artificial
  Nanobody or Nanobody fragment
  misc_feature (44)..(44): Xaa can be any naturally occurring amino acid
EVQLVESGGGLVQAGGSLRLSCTVSGSTGSINAMGWYRQAPGRXRELVAIIYSSGRIDYADSVKGRFTISRDNAKNTVDLQMNSLKPDDTAAYYCNAANPNTGWQRPHRASWGQGTQVTVSS

SEQ ID NO: 1350 - protein, 122 aa, Artificial; identical to SEQ ID NO: 1345
  Nanobody or Nanobody fragment

SEQ ID NO: 1351 - protein, 117 aa, Artificial
  Nanobody or Nanobody fragment
EVQLVESGGELVQAGGSLRLSCAASGSVSSINVMGWYRQAPGKQRELVATISSSGYTDYSDSAKGRFTISRDNKNTVHLQMNSLKPEDTAVYYCRASTLRTGWFTGWGQGTQVTVSS

SEQ ID NO: 1352 - protein, 117 aa, Artificial
  Nanobody or Nanobody fragment
EMQLVESGGELVQAGGSLRLSCAASGSVSSINVMGWYRQAPGKQRELVATISSSGYTDYSDSAKGRFTISRDNKNTVHLQMNSLKPEDTAVYYCRASTLRTGWFTGWGQGTQVTVSS

SEQ ID NO: 1353 - protein, 117 aa, Artificial
  Nanobody or Nanobody fragment
EVQLVESGGELVQAGGSLRLSCAASGSVSSINVMGWYRQAPGKQRELVATISSSGCTDYSDSAKGRFTISRDNKNTVHLQMNSLKPEDTAVYYCRASTLRTGWFTGWGQGTQVTVSS

SEQ ID NO: 1354 - protein, 118 aa, Artificial
  Nanobody or Nanobody fragment
AEVQLVESGGELVQAGGSLRLSCAAPGSVSSINVMGWYRQAPGKQRELVATISSSGYTDYADSAKGRFTISRDNKNTVHLQMNSLKPEDTAVYYCRASTLRTGWFTGWGQGTQVTVSS

SEQ ID NO: 1355 - protein, 117 aa, Artificial
  Nanobody or Nanobody fragment
  misc_feature (74)..(74): Xaa can be any naturally occurring amino acid
EVQLVESGGGLVQAGRSLRLSCAASGSVSSINVMAWYRQAPGKQRELVATISSSGYTDYSDSAKGRFTISRDDXNTVHLQMNSLKPEDTAVYYCRASTARTGWLRAWGQGTQVTVSS

SEQ ID NO: 1356 - protein, 117 aa, Artificial
  Nanobody or Nanobody fragment
  misc_feature (105)..(105): Xaa can be any naturally occurring amino acid
EVQLVESGGGLVQAGGSLRLSCAASGSVSSINVMGWYRQAPGKQRELVATISSSGYTDYSDSAKGRFTISRDNENTVHLQMNSLKPEDTGVYYCRASTARTGWLXPWGQGTQVTVSS

SEQ ID NO: 1357 - protein, 117 aa, Artificial
  Nanobody or Nanobody fragment
  misc_feature (61)..(61): Xaa can be any naturally occurring amino acid
EVQLVESGGGLVQAGGSLRLSCAASGSVSSINVMAWYRQAPGKERELVATISTTGYTDYSXSAKGRFTISRDSKNTVHLQMNSLKPEDTAVYYCRASTLRTGWLMGWGQGTQVTVSS

SEQ ID NO: 1358 - protein, 117 aa, Artificial
  Nanobody or Nanobody fragment
  misc_feature (1)..(1): Xaa can be any naturally occurring amino acid
  misc_feature (25)..(25): Xaa can be any naturally occurring amino acid
  misc_feature (61)..(61): Xaa can be any naturally occurring amino acid
XVQLVESGGGLVQAGGSLRLSCAAXGSVSSINVMGWYRQAPGKQRELVATISTTGYTDYSXSAKGRFTISRDNKNTVHLQMNSLKPEDTAVYYCRASTLRTGWLKGWGQGTQVTVSS

SEQ ID NO: 1359 - protein, 117 aa, Artificial
  Nanobody or Nanobody fragment
EVQLVESGGGLVQAGGSLRLSCAASGSVSSINVMAWYRQAPGKQRELVATISSTGYTDYSDSAKGRFTISRDNKNTVHLQMNSLKPEDTAVYYCRASTLRTGWFMGWGQGTQVTVSS

SEQ ID NO: 1360 - protein, 117 aa, Artificial
  Nanobody or Nanobody fragment
EVQLVESGGGLVQAGGSLRLSCATSGSVSSINVMAWYRQAPGKQRELVATISTSGYTDYSDSAKGRFTISRDNKNTVHLQMNSLKPEDTAVYYCRASTLRTGWLMGWGQGTQVTVSS

SEQ ID NO: 1361 - protein, 117 aa, Artificial
  Nanobody or Nanobody fragment
EVQLVESGGGLVQAGGSLRLSCAASGSVSSINVMAWYRQAPGKQRELVATISTSGYTDYSDSAKGRFTISRDNKNTVHLQMNSLKPEDTAVYYCRASTLRTGWLMGWGQGTQVTVSS

SEQ ID NO: 1362 - protein, 117 aa, Artificial
  Nanobody or Nanobody fragment
EVQLVESGGGLVQAGGSLRLSCAASGSVSAINVMAWYRQAPGKQRELVATISSTGYTDYSDSAKGRFTISRDNKNTVYLQMNSLKPEDTAIYYCRASTLRTGWLMGWGQGTQVTVSS

SEQ ID NO: 1363 - protein, 117 aa, Artificial
  Nanobody or Nanobody fragment
  misc_feature (3)..(3): Xaa can be any naturally occurring amino acid
EVXLVESGGGLVQAGGSLRLSCAASGSISSINLMGWYRQAPGKQRELVATISSTAYTDYSDSAKGRFTISRDNKNTVHLQMNSLKPEDTAVYYCRASTLRTGWLPGWGQGTQVTVSS

SEQ ID NO: 1364 - protein, 117 aa, Artificial
  Nanobody or Nanobody fragment
  misc_feature (3)..(3): Xaa can be any naturally occurring amino acid
EVXLVESGGGLVQAGRSLRLSCAASGSVSSINVMAWYRQAPGKQRELVATISSSGYTDYSDSAKGRFTISRDDENTVHLQMNSLKPEDTAVYYCRASTARTGWLRAWGQGTQVTVSS

SEQ ID NO: 1365 - protein, 117 aa, Artificial
  Nanobody or Nanobody fragment
  misc_feature (1)..(1): Xaa can be any naturally occurring amino acid
XVQLVESGGGLVQAGGSLRLSCAASGSVSAINVMAWYRQAPGKQRELVATVSTTGYTDYSDSAKGRFTISRDNKNTVYLQMNSLKPEDTAIYYCRASTLRTGWLMGWGQGTQVTVSS

SEQ ID NO: 1366 - protein, 117 aa, Artificial
  Nanobody or Nanobody fragment
  misc_feature (13)..(13): Xaa can be any naturally occurring amino acid
  misc_feature (19)..(19): Xaa can be any naturally occurring amino acid
EVQLVESGGGLVXPGRSLXLSCAASGSIFGGNTMGWFRQAPGKRREMVATITSHGTGDYTGSVEGRFTISRDNAKNTVYLQMNSLKPEDTAVYYCNSLIGWARNDYWGRGTQVTVSS

SEQ ID NO: 1367 - protein, 115 aa, Artificial
  Nanobody or Nanobody fragment
EVQLVESGGGLVQAGGSLRLSCAASGSRLRFELMGWYRQAPGKPRDLVALITSSGSANYADSVKGRFTISRDNAKNTLYLQMNSLKPEDTGVYYCNAHTYTDNLWGQGTQVTVSS

SEQ ID NO: 1368 - protein, 115 aa, Artificial
  Nanobody or Nanobody fragment
  misc_feature (1)..(1): Xaa can be any naturally occurring amino acid
XVQLVESGGGLVQAGGSLRLSCAASGSRLRFELMGWYRQAPGKPRDLVALITSSGSANYADSVKGRFTISRDNAKNTLYLQMNSLKPEDTGVYYCNAHTYTDNLWGQGTQVTVSS

SEQ ID NO: 1369 - protein, 115 aa, Artificial
  Nanobody or Nanobody fragment
EVQLVESGGGVVEAGGSLRLSCAATGSRFRFEIMGWYRQAPGKPRDLVALITRSGSANYADSVKGRFTISRDSAKNTLYLQMNSLKPEDTGVYYCNAHTYTDNLWGQGTQVTVSS

SEQ ID NO: 1370 - protein, 115 aa, Artificial
  Nanobody or Nanobody fragment
EVQLVESGGGLVQAGGSLRLSCAASGSRFRFEIMGWYRQAPGKPRDLVALITSSGSANYADSVKGRFTISRDNAKNTLYLQMNSLKSEDTGVYYCNAHTYTDNLWGQGTQVTVSS

SEQ ID NO: 1371 - protein, 115 aa, Artificial
  Nanobody or Nanobody fragment
EMQLVESGGGLVQAGGSLRLSCAASGSRLRFELMGWYRQAPGKPRDLVALITSSGSANYADSVKGRFTISRDNAKNTLYLQMNSLKPEDTGVYYCNAHTYTDNLWGQGTQVTVSS

SEQ ID NO: 1372 - protein, 115 aa, Artificial
  Nanobody or Nanobody fragment
  misc_feature (1)..(1): Xaa can be any naturally occurring amino acid
XVQLVESGGGLVQAGGSLRLSCAASGSRFRFEIMGWYRQAPGKPRDLVALITNSGSANYABSVKGRFTISRDNAKNTLYLQMNSLKPEDTGVYYCNAHTYTDSLWGQGTQVTVSS

SEQ ID NO: 1373 - protein, 115 aa, Artificial
  Nanobody or Nanobody fragment
KVQLVESGGGLVQAGGSLRLSCAASGSRFRFELMGWYRQAPGKPRDLVALITSSGSANYAESVKGRFTISRDNAKNTLYLQMNSLKPEDTGVYYCNAHTYTDNLWGQGTQVTVSS

SEQ ID NO: 1374 - protein, 115 aa, Artificial
  Nanobody or Nanobody fragment
EVQLVESGGGLVQAGGSLRLSCAASGSRFRFELMGWYRQAPGKPRDLVALITSSGSANYADSVKGRFTISRDNAKNTLYLQMNSLKPEDTGVYYCNAHTYTDNLWGQGTQVTVSS

SEQ ID NO: 1375 - protein, 115 aa, Artificial
  Nanobody or Nanobody fragment
EVQLVESGGGLVQVGGSLRLSCAASGSRFRFELMGWYRQAPGKPRDLVALITSSGSANYADSVKGRFTISRDNAKNTLYLQMNSLKPEDTGVYYCNAHTYTDNLWGQGTQVTVSS

SEQ ID NO: 1376 - protein, 115 aa, Artificial
  Nanobody or Nanobody fragment
EVQLVESGGGLVQAGGSLRLSCAASGSRLRFELMGWYRQAPGKPRDLVALITSSGSANYADSVKGRFTISRDNAKNTLYLQMNSLEPEDTGVYYCNAHTYTDNLWGQGTQVTVSS

SEQ ID NO: 1377 - protein, 115 aa, Artificial
  Nanobody or Nanobody fragment
EVQLVESRGGLVQAGGSLRLSCAASGSRLRFELMGWYRQAPGKPRDLVALITSSGSANYADSVKGRFTISRDNAKNTLYLQMNSLKPEDTGVYYCNAHTYTDNLWGQGTQVTVSS

SEQ ID NO: 1378 - protein, 115 aa, Artificial
  Nanobody or Nanobody fragment
EVQLVESGGGLVQAGGSLRLSCAASGSRFRFELMGWYRQAPGKPRDLVALITRSGSANYADSVKGRFTISRDNAKNTLYLQMNSLKPEDTGVYYCNAHTYTDNLWGQGTQVTVSS

SEQ ID NO: 1379 - protein, 115 aa, Artificial
  Nanobody or Nanobody fragment
EVQLVESGGGLVRAGGSLRLSCAASGSRFRFEIMGWYRQAPGSARDLVALITNSGSANYADSVKGRFTISRDNAKNTFYLQMNSLKPEDTGVYYCNAHTYTDNLWGQGTQVTVSS

SEQ ID NO: 1380 - protein, 115 aa, Artificial
  Nanobody or Nanobody fragment
  misc_feature (10)..(10): Xaa can be any naturally occurring amino acid
  misc_feature (22)..(22): Xaa can be any naturally occurring amino acid
  misc_feature (39)..(39): Xaa can be any naturally occurring amino acid
  misc_feature (53)..(53): Xaa can be any naturally occurring amino acid
  misc_feature (72)..(72): Xaa can be any naturally occurring amino acid
  misc_feature (75)..(75): Xaa can be any naturally occurring amino acid
  misc_feature (97)..(97): Xaa can be any naturally occurring amino acid
EVQLVESGGXLVQAEGSLRLSXAASGSRFRFELMGWYRXAPGKPRDLVALITXSGSANYADSVKGRFTISRXNAXNTLYLQMNSLKPEDTGVYYCNXHTYTDNLWGQGTQVTVSS

SEQ ID NO: 1381 - protein, 115 aa, Artificial
  Nanobody or Nanobody fragment
EVQLVESGGGLVQAGGSLRLSCAASGSRFRFEIMGWYRQAPGRMRDLVALITSSGSTNYADSVKGRFTISRDNAKNTLYLQMNSLKPEDTGVYYCNAHTYTDNLWGQGTQVTVSS

SEQ ID NO: 1382 - protein, 115 aa, Artificial
  Nanobody or Nanobody fragment
EVQLVESGGGLVQAGGSVRLSCAASGVIFRFVLMGWYRQAPGKQRELVAQITSSDATNYADSVKGRFTISRDNAKKTVDLQMNSLKPEDTAVYYCLLARGPDVYWGQGTQVTVSS

SEQ ID NO: 1383 - protein, 115 aa, Artificial
  Nanobody or Nanobody fragment
  misc_feature (3)..(3): Xaa can be any naturally occurring amino acid
  misc_feature (19)..(19): Xaa can be any naturally occurring amino acid
  misc_feature (39)..(39): Xaa can be any naturally occurring amino acid
KVXLVESGGGLVQAGGSVXLSCAASGVIFRFVLMGWYRXAPGKQRELVAQITSSDATNYADSVKGRFTISRDNAKKTVDLQMNSLKPEDTAVYYCLLARGPDVYWGQGTQVTVSS

SEQ ID NO: 1384 - protein, 114 aa, Artificial
  Nanobody or Nanobody fragment
EVQLVESGGGLVQAGGSQKLSCAASGSTLIYTMGWYRQALGKKRVFVASISRDGSTIYGDSVKGRFTISRDNAKNTAYLQMNSLKPEDTAVYVCKAEGWYQGYWGQGTQVTVSS

SEQ ID NO: 1385 - protein, 114 aa, Artificial
  Nanobody or Nanobody fragment
  misc_feature (97)..(97): Xaa can be any naturally occurring amino acid
EVQLVESGGGLVQAGGSLRLSCAASGSTEIYTMGWYRQAPGKQRVFVASISRDGSTIYGDSVKGRFTISRDSAKNTAYLQMNRLKPEDTAVYVCKAXGWYNGYWGQGTQVTVSS

SEQ ID NO: 1386 - protein, 114 aa, Artificial
  Nanobody or Nanobody fragment
EVQLVESGGGLVQAGGSQKLSCAASGSTLIYTMGWYRQALGKKRVFVASISRDGSTIYGDSVKGRFTISRDNAKNTAYLQMNNLKPEDTAVYVCKAEGWYQGYWGQGTQVTVSS

SEQ ID NO: 1387 - protein, 117 aa, Artificial
  Nanobody or Nanobody fragment
EVQLVESGGGLVQAGGSLRLSCAASGNTFSINAVGWYRQAPEKQRELVAIILSSGTTDYADSVKGRFTISRDNAKNIVYLQMNSLKPEDTAVYYCRVADREMGWAYWGQGTQVTVSS

SEQ ID NO: 1388 - protein, 117 aa, Artificial
  Nanobody or Nanobody fragment
  misc_feature (52)..(52): Xaa can be any naturally occurring amino acid
  misc_feature (54)..(54): Xaa can be any naturally occurring amino acid
  misc_feature (96)..(98): Xaa can be any naturally occurring amino acid
  misc_feature (101)..(101): Xaa can be any naturally occurring amino acid
  misc_feature (104)..(104): Xaa can be any naturally occurring amino acid
EVQLVESGGGLVQAGGSLRLSCAASGNTFSINAVGWYRQAPEKQRELVAIIXSXGTTDYADSVKGRFTISRDNAKNTVYLQMNSLKPEDTAVYYCXXXDRXMGXAYWGQGTQVTVSS

SEQ ID NO: 1389 - protein, 122 aa, Artificial
  Nanobody or Nanobody fragment
EVQLVESGGGLVQTGGSLRLSCAASGSIFMILAMGWYRQAPGKQRELVTTIIRDGKTYYSDSVKDRFTISRDNAKNTAYLQMNSLKPEDTAVYYCYTKVIVMGAGMDDNDFFGQGTQVTVSS

SEQ ID NO: 1390 - protein, 112 aa, Artificial
  Nanobody or Nanobody fragment
EVQLVESGGGLVQPGGSLRLSCAASGSILSRTDVDWYRQAPGKGREWVAIIAPFGTTNSRDSRFTISRDNAKNIVYLQMNSLEPEDTAVYYCRIYWGGNVYWGQGTQVTVSS

SEQ ID NO: 1391 - protein, 119 aa, Artificial
  Nanobody or Nanobody fragment
EVQLVESGGGLVQAGGSLRLSCAPSSSAVSIVHIQWHRQAPGKQRELVASVNSRGTTNYADSVKGRAIISRDNAKNTVYLQMNSLKPEDTAVYYCYARTLQLGALRDYWGQGTQVTVSS

SEQ ID NO: 1392 - protein, 120 aa, Artificial
  Nanobody or Nanobody fragment
EVQLVESGGGLVQAGGSLRLSCAASASILSINTMDWFRRTPGKQRELVSTITRDGRTTYADSVKGRFTLSRDNTKNTVSLQMNSLKPEDTAVYYCLANVETTRGLTKNYWGQGIQVTVSS

SEQ ID NO: 1393 - protein, 116 aa, Artificial
  Nanobody or Nanobody fragment
EVQLVESGGGLVQTGGSLRLSCAASGSTFNINAWGWYRQAPGKQRELVAVISSSGSTDYSDAVKGRFTISTVNAGNTVYLEMNSLKPEDTAVYYCRAADSGPWRYWGQGSQVTVSS

SEQ ID NO: 1394 - protein, 121 aa, Artificial
  Nanobody or Nanobody fragment
EVQLVESGGGKVQAGMSQRLSCAASGGIGTFSSVAWYRQAPGKQRELVAQITHEGTRNYADSVKGRFTISREFTLSRDGPKEMVHLQMVSLKPEDTAVYYCNAVQFGRNYWGQGTQVTVSS

SEQ ID NO: 1395 - protein, 118 aa, Artificial
  Nanobody or Nanobody fragment
EVQLVESGGGLVQAGGSLRLSCAASGSIFSINYMGWYRQAPGKQREAVAIIDRVGASTNYVDSVRGRFTISRSNAKNENMLYLQMNSLKPEDTAVYYCNTVPTTSAYWGPGTQVTVSS

SEQ ID NO: 1396 - protein, 118 aa, Artificial
  Nanobody or Nanobody fragment
  misc_feature (1)..(1): Xaa can be any naturally occurring amino acid
  misc_feature (62)..(62): Xaa can be any naturally occurring amino acid
XVQLVESGGGLVQAGGSLRLSCAATGTIFSSNYMGWYRQAPGLQRESVAIIDRGGASTNYVXSVRGRFTISRSNAKNQSMLYLQMNSLKPEDTAVYYCNTVPTTSAYWGPGTQVTVSS

SEQ ID NO: 1397 - protein, 118 aa, Artificial
  Nanobody or Nanobody fragment
EVQLVESGGGLVQAGGSLRLSCAASGSIFSISYMGWYRQAPGKERESVAIIDRSGASTNYVDSVRGRFTISRSNAKNKNMLYLQMNSLKPEDTAVYYCNTVPTTSAYWGPGTQVTVSS

SEQ ID NO: 1398 - protein, 114 aa, Artificial
  Nanobody or Nanobody fragment
EVQLVESGGGLVQAGGSLKLSCVASGLILSIHTMGWYRQAPGKQREFVAVASNSGRTNYADSVKGRFTISRDNAKNTVYLQMNNLKPEDTAVYYCNSASQFASWGQGTQVTVSS

SEQ ID NO: 1399 - protein, 113 aa, Artificial
  Nanobody or Nanobody fragment
EVQLVESGGGLVQAGGSLRLSCAASGIIFSIYTMGWYRQAPGKQREFVAAATNAGTTSYAGSVKGRFTISRDNAKNTVILQMNNLKPEBTAVYYCRVLDYDYWGQGTQVTVSS

SEQ ID NO: 1400 - protein, 116 aa, Artificial
  Nanobody or Nanobody fragment
EVQLVESGGGLVQPGGSLRLSCAASRIIFSRNVMAWYRQAPGKEREPVAIITTAHSTNYVDSVKGRFTISRDNAKNTLYLEMNSLKPEDTGVYYCNKLPHYPTDSWGQGTQVTVSS

SEQ ID NO: 1401 - protein, 116 aa, Artificial
  Nanobody or Nanobody fragment
EVQLVESGGGLVQPGGSLRLSCAASRSIFSRNAMAWYRQAPGKQREPVAIITSNHGTNYVDPVKGRFTISRDNAKNTLYLQMNSLKPEDTGVYYCNKIPHYTVDSWGQGTQVTVSS

SEQ ID NO: 1402 - protein, 111 aa, Artificial
  Nanobody or Nanobody fragment
KVQLVESGGGLVQAGGSLRLSCTASGNIARITAFGWYRQAPGRQRDFVAGIFSGALTNYADSVKGRFTISRDNAKNTVFLQMNSLKTEDTGTYYCRSDNNWGQGTQVTVSS

SEQ ID NO: 1403 - protein, 111 aa, Artificial
  Nanobody or Nanobody fragment
EVQLVESGGGLVQAGGSLRLSCTASGSDVRITAFAWYRQAPGKQRDFVAGIFSGAITNYADSVKGRFTISRDNAKNTVFLQMNSLKTEDTATYYCRADNNWGQGTQVTVSS

SEQ ID NO: 1404 - protein, 113 aa, Artificial
  Nanobody or Nanobody fragment
EVQLVESGGGLVQAGGSLRLSCVASGFIFSIYGMAWYRQAPGKQRELVASITGGYGPNYVDSVKGRFTISRDDAKNTLYLQMNSLKPEDTAVYYCNQLYSDYWGKGTQVTVSS

SEQ ID NO: 1405 - protein, 120 aa, Artificial
  Nanobody or Nanobody fragment
EVQLVASGGGLVQTGGSLRLSCAASGSGFSIDGMNWSRQAPGKGRELVGYITSSGSTDYADSVKGRFTISRDNADNTVYLQMNSLKPEDTAVYYCAVATRSRLGLQQNYWGQGTQVTVSS

SEQ ID NO: 1406 - protein, 115 aa, Artificial
  Nanobody or Nanobody fragment
EVQLVESGGGLVQAGGSLRLSCAASGIIFTIYTMAWYRQAPGKQRELVAAVTYAGNRYYVDSVKGRFTISRDDAKNKVYLQMNSLKPEDTAVYYCAANPSDNPWLGQGTQVTVSS

SEQ ID NO: 1407 - protein, 116 aa, Artificial
  Nanobody or Nanobody fragment
EVQLVESGGGLVQPGGSLRLSCAASGSIRSIDAMAWYRQTPGKQRDFVAAIFSGGLTHYADSVKGRFTISRDNAKNTLYLQMNSLKPEDTAVYYCKFRAPTGSDNWGQGTQVTVSS

SEQ ID NO: 1408 - protein, 112 aa, Artificial
  Nanobody or Nanobody fragment
EVQLVQSGGGLVQAGGSLRLSCAASGYIFSSNITGWYRQAPGKQRELVAAISSDGLAHYTDSMKGRVIISRDNVENTVYLQMNSLKPEDTAVYYCAAPGAGRGQGTQVTVSS

SEQ ID NO: 1409 - protein, 121 aa, Artificial
  Nanobody or Nanobody fragment
EVQLVESGGGSVQAGGSLRLSCAASQRTFSSDVMGWFRQAPGKERDFVAYIHRSGTTYYADSVKGRLTISRDNAKSTVYLQMNSLKPEDTAVYHCAAGRYGSTSDTLYDYWGQGTQVTVSS

SEQ ID NO: 1410 - protein, 122 aa, Artificial
  Nanobody or Nanobody fragment
EVPLVESGGGSVQAGGSLRLSCAASQRTFSRDVTGWFRQAPGKERDFVAYIHRSGETTYYADSVKGRFTISRDNAKSTVYLQMNSLKPEDTAVYHCAAGRYGSTSDTLYDYWGQGTQVTVSS

SEQ ID NO: 1411 - protein, 121 aa, Artificial
  Nanobody or Nanobody fragment
  misc_feature (13)..(13): Xaa can be any naturally occurring amino acid
EVQLVESGGGSVXAGGSLRLSCAASQRTFSSDVMGWFRQAPGKERDFVAYIHRSGTTYYADSVKGRFTISRDNAKSTVYLQMNSLKPEDTAVYHCAAGRYGSTADTLYDYWGQGTQVTVSS

SEQ ID NO: 1412 - protein, 121 aa, Artificial
  Nanobody or Nanobody fragment
EVQLVESGGGSVQAGGSLRLSCAASQRTFSRDVMGWFRQAPGKERDFVAYSHRSGTTYYADSVKGRFTISRDNAKSTVYLQMNSLKPEDTAVYHCAAGRYGSTSDTLYDYWGQGTQVTVSS

SEQ ID NO: 1413 - protein, 121 aa, Artificial
  Nanobody or Nanobody fragment
  misc_feature (1)..(1): Xaa can be any naturally occurring amino acid
  misc_feature (71)..(71): Xaa can be any naturally occurring amino acid
XVQLVESGGGSVQAGGSLRLSCAASQRTFSSDVMGWFRQAPGKEGDFVAYIHRSGTTYYADSVKGRFTISXDNAKSTVYLQMNSLKPEDTAVYHCAAGRYGSTSDTLYDYWGQGTQVTVSS

SEQ ID NO: 1414 - protein, 121 aa, Artificial
  Nanobody or Nanobody fragment
  misc_feature (51)..(51): Xaa can be any naturally occurring amino acid
EVQLVESGGGSVQAGGSLRLSCATSQRTFSSDVMGWFRQAPGKERDFVAYXHRSNTTYYADSVKGRFTISRDNAKSTVYLQMNSLKPEDTAVYHCAAGRYGSTSDTLYDYWGQGTQVTVSS

SEQ ID NO: 1415 - protein, 119 aa, Artificial
  Nanobody or Nanobody fragment
EVQLVESGVGLVQAGGSLRLSCAASGYTFNHNTMAWYRQAPGKQRELAASISSGGNTYYABSVKGRFTISRDNGNNTMYLQMNNLKPEDTAVYYCNWKDWPPNYKNDYWGQGTQVTVSS

SEQ ID NO: 1416 - protein, 119 aa, Artificial
  Nanobody or Nanobody fragment
EVQLVESGGGLVQAGGSLRLSCAASGYTFNHNTMAWYRQAPVKQRELAASISSGGSTYYADSVKGRFTISRDNGNNTMYLQMNNLKPEDTAVYYCNWKDWPPNYTNDYWGQGTQVTVSS

SEQ ID NO: 1417 - protein, 119 aa, Artificial
  Nanobody or Nanobody fragment
EVQLVESGGGLVQAGESLKLSCVASGNILRVTSMGWGRQIPGKQRKLVAWITNEGRTEYADSVKGRFTISRDNAQNTLYLLMNSLKPEDTAVYYCYGFSPRESSGNTYWGQGTQVTVSS

SEQ ID NO: 1418 - protein, 127 aa, Artificial
  Nanobody or Nanobody fragment
EVQLVESGGGLVQAGGSLRLSCAASGRIYSSNTMAWFRQAPGKEREFGSAIMWRGDATYTDYADSMKDRFTISRDNAKNTVYLQMNSLKPEDTAIYYCAAGGRRWNTRKDSSQYDYWGQGTQVTVSS

SEQ ID NO: 1419 - protein, 123 aa, Artificial
  Nanobody or Nanobody fragment
EVQLVESGGGSVQAGGSLRLSCTASGSIFSINDMGWYRQPPGEQRELVATLTSSDSTKYADSVKSRFTISRDNAKNTVYLQMNSLKPEDTAVYYCNAVINRRGDGRNWSREYWGQGTQVTVSS

SEQ ID NO: 1420 - protein, 118 aa, Artificial
  Nanobody or Nanobody fragment
EVQLVESGGGLVQPGGSLRLSCAASGFTFSRMAMGWYRQAPGVERDFLAIISPGGGTNYADSVKGRFTISRDNAKNTVYLQMNSLKPEDTAVYYCNARNFEGRRVDYWGQGTQVTVSS

SEQ ID NO: 1421 - protein, 118 aa, Artificial
  Nanobody or Nanobody fragment
EVQLVESGGGLVQAGGSLRLSCAASGSTYRLNNMAWYRQSPGKKRELVALISGITSDPSTYYLDSVRGRFSISRDNALNTVYLQMNSLKPEDTAVYYCKQAWAGVEYWGQGTQVTVSS

SEQ ID NO: 1422 - protein, 115 aa, Artificial
  Nanobody or Nanobody fragment
EVQLVESGGGLVQAGGSLRLSCAASISANAIDVVSWYRQAPGKPRELAASITSAGRIKYAESVKGRFGISRDNAKNTVSLQMNSLKPEDTAVYYCNALYRNAIYWGQGTQVTVSS

SEQ ID NO: 1423 - protein, 130 aa, Artificial
  Nanobody or Nanobody fragment
  misc_feature (19)..(19): Xaa can be any naturally occurring amino acid
  misc_feature (116)..(116): Xaa can be any naturally occurring amino acid
EVQLVESGGGLVQAGGSLXLSCAASGFTFDDYAIGWFRQAPGKEREGVSCIRNSDGRTYYADSVKGRFTISSDNAKNTVYLQMNSLKPEDTALYYCAATQIGRPRGDKGANRYCSXSRDRGQGTQVTVSS

SEQ ID NO: 1424 - protein, 112 aa, Artificial
  Nanobody or Nanobody fragment
  misc_feature (5)..(5): Xaa can be any naturally occurring amino acid
  misc_feature (19)..(19): Xaa can be any naturally occurring amino acid
  misc_feature (22)..(22): Xaa can be any naturally occurring amino acid
  misc_feature (72)..(72): Xaa can be any naturally occurring amino acid
EVQLXESGGGLVQAGGSLXLSXAASGYIFSSNITGWYRQAPGKQRELVAAISSDGLAHYTDSMKGRVIISRXNVENTVYLQMNSLKPEDTAVYYCAAPGAGRGQGTQVTVSS

SEQ ID NO: 1425 - protein, 118 aa, Artificial
  Nanobody or Nanobody fragment
EVQLVESGGGLVEAGGSLRLSCATSGSTFGIEAMAWYRQAPGKQRELVATINSASRTNYADSVKGRFTISRDTGKSILYLQMNNLEPEDTAVYYCKITTPLPYRRDFWGQGTQVTVSS

SEQ ID NO: 1426 - protein, 111 aa, Artificial
  Nanobody or Nanobody fragment
EVQLVESGGGSVQAGGSLRLSCAASGTTATITVPGWYRQAPGKQRELVAVINSGGTKKYADSVKGRFTISIDNVKRTLYLEMNSLRPEDTAVYYCSTLKYWGQGTQVTVSS

SEQ ID NO: 1427 - protein, 128 aa, Artificial
  Nanobody or Nanobody fragment
EVQLVESGGGLVQAGGSLRLSCAASGRTISRFTMGWFRQGPGKERDFVAAISWGGGRTNYEDSVKGRFTISRDNAQNTVYLQMNSLKPEDTAVYYCAABSRGPYNSNWHQSSVSYDYWGQGTQVTVSS

SEQ ID NO: 1428 - protein, 128 aa, Artificial
  Nanobody or Nanobody fragment
EVQLVESGGGLVQAGGSLRLSCAASGRTISRFTMGWFRQAPGKERDFVAAISWGGGRTNYEDSVKGRFTISRDNAQNTVYLQMNSLKPEDTAVYYCAABTRGPYNSNWAQSSVSYDGWGQGTQVTVSS

SEQ ID NO: 1429 - protein, 128 aa, Artificial
  Nanobody or Nanobody fragment
EVQLVESGGGLVQAGGSLRLSCAASGRTISRFTMGWFRQAPGKEREFVAAISWGGGRTNYEDSVKGRFTISRDNAQNTVYLQMNSLKPEDTAVYYCAABTRGPYNSNWAQSSVSYDYWGQGTQVTVSS

SEQ ID NO: 1430 - protein, 128 aa, Artificial
  Nanobody or Nanobody fragment
EVQLVESGGGLVQAGGSLRLSCAASGRTISRFTMGWFRQAPGKERDFVAAISWGGGRTNYEDSVKGRFTISRDNAQNTVYLQMNSLKPEDTAVYYCAABSRGPYNSNWHQSSVSYDYWGQGTQVTVSS

SEQ ID NO: 1431 - protein, 128 aa, Artificial
  Nanobody or Nanobody fragment
EVQLVESGGGLVQAGGSLRLSCAASGRTISRFTMGWFRQAPGKERDFVAAISWGGGRTNYEDSVKGRFTISRDNAQNTVYLQMNSLKPEDTAVYYCAADTRGPYNSNWAQSSVSYDTWGQGTQVTVSS

SEQ ID NO: 1432 - protein, 128 aa, Artificial
  Nanobody or Nanobody fragment
EVQLVESGGGLVQAGGSLRLSCAASGRTISRFTMGWFRQAPGKERDFVAAISWGGGRTNYEDSVKGRFTISRDNAQNTVYLQMNSLKPEDTAVYYCAADTRGPYNSNWAQSSVSYDGWGQGTQVTVSS

SEQ ID NO: 1433 - protein, 128 aa, Artificial
  Nanobody or Nanobody fragment
EVQLVESGGGLVQAGDSLRLSCAASGRTISRFTMGWFRQAPGKERDFVAAISWGGGRTNYEDSVKGRFTISRDNAQNTVYLQMNSLKPEDTAVYYCAADTRGPYNSNWAQSSVSYDGWGQGTQVTVSS

SEQ ID NO: 1434 - protein, 128 aa, Artificial
  Nanobody or Nanobody fragment
EVQLVESGGGLVQAGGSLRLSCAASGRTISRFTMGWFRQAPGKERDFVAAISWGGGRTNYEDSVKGRFTISRDNAQNTVYLQMNSLKPEDTAVYYCAABTRGPYNSNWHQSSVSYDAWGQGTQVTVSS

SEQ ID NO: 1435 - protein, 128 aa, Artificial
  Nanobody or Nanobody fragment
EVQLVESGGGLVPAGGSLRLSCAASGRAISRFTMGWFRQAPGKERDFVAAISWGGGRTDYEDSVKGRFTISRDNARNTVYLQMNSLKPEDTAVYYCAABTRGPYNSNWAQSSVSYNYWGQGTQVTVSS

SEQ ID NO: 1436 - protein, 128 aa, Artificial
  Nanobody or Nanobody fragment
EVQLVESGGGLVQAGGSLRLSCAASGRTISRFTMGWFRQAPGKERDFVAAISWGGGRTKYEDSVTGRFTISRDNAQNTVYLQMDSLKPEDTAVYYCAABSRGPYNSNWHQSSVSYDYWGQGTQVTVSS

SEQ ID NO: 1437 - protein, 128 aa, Artificial
  Nanobody or Nanobody fragment
EVQLVESGGGLVQAGGSLRLSCAASGRTISRFTMGWFRQAPGKERDFVAAISWGGGRTKYEDSVTGRFTISRDNAQNTVYLQMNSLKPEDTAVYYCAABSRGPYNSNWHQSSVSYDYWGQGTQVTVSS

SEQ ID NO: 1438 - protein, 128 aa, Artificial
  Nanobody or Nanobody fragment
  misc_feature (1)..(1): Xaa can be any naturally occurring amino acid
XVQLVESGGGLVQAGGSLRLSCAASGRTISRFTMGWFRQAPGKERDFVAAISWGGGRTNYGDSVKGRSTISRDNAQNTVYLQMNSLKPEDTAVYYCAABTRGPYNSNWAQSSVSYDYWGQGTQVTVSS

SEQ ID NO: 1439 - protein, 128 aa, Artificial
  Nanobody or Nanobody fragment
EVQLVESGGGLVQAGGSLRLSCAASGRTISRFTMGWFRQAPGKERDFVAAISWGGGRTNYEDSVKGRSTISRDNAQNTVYLQMNSLKPEDTAVYYCAABTRGPYNSNWAQSSVSYDYWGQGTQVTVSS

SEQ ID NO: 1440 - protein, 128 aa, Artificial
  Nanobody or Nanobody fragment
  misc_feature (1)..(1): Xaa can be any naturally occurring amino acid
XVQLVESGGGLVQAGGSLRLSCAASGRTISRFTMGWFRQAPGKERDFVAAISWGGGRTNYEBSVKDRFTISRDNAQNTVYLQMNSLKPEDTAVYYCAADSRGPYNSNWHQSSVSYDYWGQGTQVTVSS

SEQ ID NO: 1441 - protein, 128 aa, Artificial
  Nanobody or Nanobody fragment
EVQLVESGGGLVQAGGSLRLSCAASGRTISRFTMGWFRQAPGKERDFVAAISWGGGRTNYEDSVKDRFTISRDNAQNTVYLQMNSLKPEDTAVYYCAABSRGPYNSNWHQSSVSYDYWGQGTQVTVSS

SEQ ID NO: 1442 - protein, 128 aa, Artificial
  Nanobody or Nanobody fragment
  misc_feature (3)..(3): Xaa can be any naturally occurring amino acid
EVXLVESGGGLVQAGGSLRLSCAASGRTISRFTMGWFRQAPGKERDFVAAISWGGGRTKYEDSVTGRFTISRDNAQNTVYLQMDSLKPEDTAVYYCAADSRGPYNSNWHQSSVSYDYWGQGTQVTVSS

SEQ ID NO: 1443 - protein, 128 aa, Artificial
  Nanobody or Nanobody fragment
  misc_feature (3)..(3): Xaa can be any naturally occurring amino acid
EVXLVESGGGLVQAGGSLRLSCAASGRTISRFTMGWFRQAPGKERDFVAAISWGGGRTKYEDSVTGRFTISRDNAQNTVYLQMDSLKPEDTAVYYCAABSRGPYNSNWHQSSVSYDYWGQGTQVTVSS

SEQ ID NO: 1444 - protein, 125 aa, Artificial
  Nanobody or Nanobody fragment
EVQLVESGGGLVQAGGSLSLSCAASGASGIIYSINAMGWYRQAPGKQREVVAVVTNGGSTEYADFVKGRFTVSREYAKNAVYLQMNSLKPEDTAVYYCYARGIIARWGSAPGNYWGQGTQVTVSS

SEQ ID NO: 1445 - protein, 125 aa, Artificial
  Nanobody or Nanobody fragment
EVQLVESGGGLVQAGGSLRLSCAASGASGTIYSISSMGWYRQAPGKQREVVAVVTNGGSTEYADFVKGRFTVSREYAKNAVYLQMNSLKPEDTAVYYCYARGIIARWGSAPGNYWGQGTQVTVSS

SEQ ID NO: 1446 - protein, 120 aa, Artificial
  Nanobody or Nanobody fragment
EVQLVESGGGLVQPGGSLRLSCAVSGFTSDYYAIGWFRQAPGKEREGVSCISSSDGSTYYABSVKGRFTISRDNAKNTVYLQMNSLKPEDTAVYYCATTCVVNPEGYDFWGQGTQVTVSS

SEQ ID NO: 1447 - protein, 122 aa, Artificial
  Nanobody or Nanobody fragment
EVQLVESGGGLVQAGGSLRLSCAASGSISSINSINIMGWYRQAPGKQRDLVAYITKRGSTKYADSVKGRFTISRDNAKNMATLQMNSLKPEDTAVYYCAAGPDGLGGQDDYWGQGTQVTVSS

SEQ ID NO: 1448 - protein, 110 aa, Artificial
  Nanobody or Nanobody fragment
EVQLVESGGGLVQAGGSLRLACQASRAIERIVGWYRQAPGKQRELVAAITVPGITNYTDSVKDRFTISRDSAKNTVYLQMNKLKPEDTAVYYCAAPTYGRGQGTQVTVSS

SEQ ID NO: 1449 - protein, 114 aa, Artificial
  Nanobody or Nanobody fragment
EVQLVESGGGMVQTGGSLRLSCAASGSTLNINNGEWYRQAPGKQREFVAAIGSGGTTDYADSVKGRFTISKANAKNTLYLQMNSLKPEDTAVYYCYVRSWRNYWGQGTQVTVSS

SEQ ID NO: 1450 - protein, 130 aa, Artificial
  Nanobody or Nanobody fragment
EVQLVESGGGLVQAGGSLRLSCTASGRTASTYAMGWLRQAPGKEREFVAAISYSGATTYYADSVKGRFTISRDNAKSTAYLQMNSLQPEDTAVYYCAASANRDLSLWVSTAYRSTGLWYWGQGTQVTVSS

SEQ ID NO: 1451 - protein, 123 aa, Artificial
  Nanobody or Nanobody fragment
EVQLVESGGGLVQAGGSLRLSCAASGGTFSTYAMGWFRQAPGEERQFVATITWTGYTYYTDSVKGRFTISRDNAKKTVYLRMDKLKPEDTAVYYCAADRRGYIETMSVNYDYWGQGTQVTVSS

SEQ ID NO: 1452 - protein, 123 aa, Artificial
  Nanobody or Nanobody fragment
EVQLVESGGGLVQPGGSLRLSCAASGSISIINFMNWYRQAPGKQRELVAQVTSGVTSGGTTYYDDSVKGRFTISRDNAKNMVSLQMNSLKPEDTAVYYCNVQGYFGSTWINYWGQGTQVTVSS

SEQ ID NO: 1453 - protein, 123 aa, Artificial
  Nanobody or Nanobody fragment
EVQLVESGGGLVQPGGSLRLSCAAPGSISIINFMNWYRQAPGKQRELVAQVTSGVTSGGTTYYDDSVKGRFTISRDNAKNMVSLQMNSLKPEDTAVYYCNVQGYFGSTWINYWGQGTQVTVSS

SEQ ID NO: 1454 - protein, 123 aa, Artificial
  Nanobody or Nanobody fragment
EVPLVESGGGLVQPGGSLRLSCAASGSISIINFMNWYRQAPGKQRELVAQVTSGVTSGGTTYYDDSVKGRFTISRDNAKNMVSLQMNSLKPEDTAVYYCNVQGYFGSTWINYWGQGTQVTVSS

SEQ ID NO: 1455 - protein, 123 aa, Artificial
  Nanobody or Nanobody fragment
EVRLVESGGGLVQPGGSLRLSCAASGSISIINFMNWYRQAPGKQRELVAQVTSGVTSGGTTYYDDSVKGRFTISRDNAKNMVSLQMNSLKPEDTAVYYCNVQGYFGSTWINYWGQGTQVTVSS

SEQ ID NO: 1456 - protein, 120 aa, Artificial
  Nanobody or Nanobody fragment
EVQLVESGGGLVQPGGSLRLSCAASGFTFSRYTMTWVRQAPGKEPEWVSSITSRGSSTNYADSVKGRFTISRDNAKNTLYLQMNSLKPGDTAMYYCAKSGTETWYDRTYWGQGTQVTVSS

SEQ ID NO: 1457 - protein, 120 aa, Artificial
  Nanobody or Nanobody fragment
EVQLVESGGGLVQPGGSLRLSCAASGFTFSRYTMTWVRQAPGKEPEWVSSITSRGSSTNYADSAKGRFTISRDNAKNTLYLQMNSLKPGDTAMYYCAKSGTETWYDRTYWGQGTQVTVSS

SEQ ID NO: 1458 - protein, 120 aa, Artificial
  Nanobody or Nanobody fragment
EVQLVESGGGLVKAGGSLRLSCAASGSIFSINTMAWYRQAPGKQREWITSITSRGTTRYABSVKGRFTISTSNDKSTVYLQMNSLKPEDTAVYYCAADKDGVIGYSVGYWGQGTQVTVSS

SEQ ID NO: 1459 - protein, 120 aa, Artificial
  Nanobody or Nanobody fragment
EVQLVESGGGLVEAGGSLRLSCAASGSIFSINVMGWYRQAPGKQRELIGSITSRGTTRYTDSVKGRFTISRGNDKSTVYLQMNSLKPEDTAVYYCAABKGGVIGYSEGYWGQGTQVTVSS

SEQ ID NO: 1460 - protein, 120 aa, Artificial
  Nanobody or Nanobody fragment
EVQLVESGGGLVEAGGSLRLSCAASGSIFSINVMGWYRQAPGKQRELIGSITSRGTTRYADSVKGRFTISRGNDMSTVYLQMNSLKPEDTAVYYCAABKGGVIGYSVGYWGQGTQVTVSS

SEQ ID NO: 1461 - protein, 114 aa, Artificial
  Nanobody or Nanobody fragment
EVQLVESGGGLVQAGGSLQLSCATSGESFSIKAMGWYRQAPGNQREMVATITGTGKTNYADSVKGRFTISRDIGTLYLQMNSLKPEDTAVYYCNLLSWPAGDYWGQGTQVTVSS

SEQ ID NO: 1462 - protein, 114 aa, Artificial
  Nanobody or Nanobody fragment
  misc_feature (72)..(72): Xaa can be any naturally occurring amino acid
EVQLVESGGGLVQAGGSLRLSCTTSGRSFSIKAMGWYRQAPGNQRELVATITGTGSTTYADSAKGRFTISRXIGTLYLQMNSLKPEDTGVYYCNLLSWPAGDYWDQGTQVTVSS

SEQ ID NO: 1463 - protein, 123 aa, Artificial
  Nanobody or Nanobody fragment
EVQLVESGGALVQAGGSLRLSCAASGFAFSINTMAWYRQAPGNERDWVAIIFPGTGGSTVYEDSVKGRFTISRVNAKNTLYLQMDSLRPEDTGVYYCARVRYIGGNYFPFDSWGQGTQVTVSS

SEQ ID NO: 1464 - protein, 123 aa, Artificial
  Nanobody or Nanobody fragment
  misc_feature (28)..(28): Xaa can be any naturally occurring amino acid
EVQLVESGGALVQAGGSLRLSCAASGFXFSINTMAWYRQAPGKQRDWVAIIAPGTGGSTHYEDSVKGRFTISRVNAKNTLYLQMDSLRPEDTAVYYCARVRYTGGNYFPFDSWGQGTQVTVSS

SEQ ID NO: 1465 - protein, 121 aa, Artificial
  Nanobody or Nanobody fragment
  misc_feature (1)..(1): Xaa can be any naturally occurring amino acid
XVQLVESGGGLVQPGGSLRLSCAASGFAFSNYPMGWVRQAPGKGLEWVSGISASSIRTSYADSVKGRFTISRDHAKNTLYLQMNSLKVEDTAVYYCAQLRNYRYFGDMDYRGEGTLVTVSS

SEQ ID NO: 1466 - protein, 121 aa, Artificial
  Nanobody or Nanobody fragment
EVQLVESGGGLVQPGGSLRLSCAASGFAFSHYPMGWVRQAPGKGLEWVSGISASSIRTSYADSVKGRFTISRDHAKNTLYLQMNSLKVEDTAVYYCAQLRNYRYFGDMDYRGEGTLVTVSS

SEQ ID NO: 1467 - protein, 124 aa, Artificial
  Nanobody or Nanobody fragment
EVQLVESGGGLVQAGGSPRLSCVASGRTFSRCAMGWFRQAPGKEREFVATISANGELIYYANFVEGRFTISRDNAKNTVYLQMNSLKPEDTAVYFCAARRTFTRSSNRNEYADWGQGTQVTVSS

SEQ ID NO: 1468 - protein, 121 aa, Artificial
  Nanobody or Nanobody fragment
EVQLVESGGGLVQAGGSLTLSCAASGSVFSINAMGWYRQAPGKQRELVATITTRGTTNYVDAVKGRFTISKDNAKNTMYLQMNSLKPEDTAVYYCAABSPPYGMGSDLGYWGQGTQVTVSS

SEQ ID NO: 1469 - protein, 120 aa, Artificial
  Nanobody or Nanobody fragment
EVQLVESGGGLVQAGGSLRLSCAASGRMFSPNVMGWFRQAPGDQREFVANIYSGGSTNYADTVKGRFTILSDNAKNTVYLQMTSLKPEDTGVYYCSVKRVGQSWFDSGYWGQGTQVTVSS

SEQ ID NO: 1470 - protein, 124 aa, Artificial
  Nanobody or Nanobody fragment
  misc_feature (109)..(109): Xaa can be any naturally occurring amino acid
EVQLVESGGGLVQAGGSLNLSCAASGRILRINNMGWYRQAPGNKRDLVARITSGGSHRNYABSVKGRFTISIDNTRKTVYLQMNSLKPEDTAVYYCYGAIVSSRWGAEXTNDYWGQGTQVTVSS

SEQ ID NO: 1471 - protein, 121 aa, Artificial
  Nanobody or Nanobody fragment
EVQLVESGGGLVQAGGSLRLSCGASGSIGTFNIMGWYRQAPGKQREMVATMTSGGNTRYADSVKGRSTISRENAKKTITLQMNNLKPEDTGVYYCNLKTLTAWSTSTGDYWGQGTQVTVSS

SEQ ID NO: 1472 - protein, 128 aa, Artificial
  Nanobody or Nanobody fragment
EVQLVESGGGLVQAGGSLKLSCAASGFTFDDYAIGWFRQAPGKEREGVSCISSPDGSTYLVDSVKGRFTVSSDNAKNTAYLQMNSLKPEDTAVYYCALRRGGSYYFCDPLTVYEYDYWGQGTQVTVSS

SEQ ID NO: 1473 - protein, 125 aa, Artificial
  Nanobody or Nanobody fragment
EVQLVESGGALVQPGGSLRLSCAASGFAFSNTVMSWARQAPGKGLEWVSTISASGVRTRYADSVTGRFTISRDYAKRTLYLQMNSLSPEDTGVYYCVRRKSYTDYDPPRWDYDTWGQGTQVTVSS

SEQ ID NO: 1474 - protein, 114 aa, Artificial
  Nanobody or Nanobody fragment
EVQLVESGGGLVQAGGSLRLSCAASGGTFRYQNMGWYRQAPGNEREWVASNWATGATAYADSVKGRFTISRDDAKNVVYLQMNNLKPEDTAVYYCNRLSRPWSWGQGTQVTVSS

SEQ ID NO: 1475 - protein, 116 aa, Artificial
  Nanobody or Nanobody fragment
EVQLVESGGGLVQAGGSLRLSCTVSITTYSFKRVAWHRQAPGNERELVAAIWNTDNTDYADSVKGRFTISRDNAKKTVYLQMNRLKPEDTAVYYCSANRGSYGTYWGQGTQVTVSS

SEQ ID NO: 1476 - protein, 122 aa, Artificial
  Nanobody or Nanobody fragment
EVQLVDSGGRLVQPGDLLRLSCTTSGFASSGYVLGWFRQAPGKEREFVAAIIRSGGNTAYSDSVKGRFTISRDNAKNTVYLQMKSLKPEDTGIYYCARSSVLGRSPALYDLWGQGTQVTVSS

SEQ ID NO: 1477 - protein, 126 aa, Artificial
  Nanobody or Nanobody fragment
EVQLVESRGGLVQAGGSLRLSCTASERTFSRNVMAWFRQAPGKEREFVAAIRWSGGTTSYADFVKGRFTMSRDNAKNTIYLEMNSLKPEDTAVYYCAADARLYSPLPRRSSAYDYWGQGTQVTVSS

SEQ ID NO: 1478 - protein, 126 aa, Artificial
  Nanobody or Nanobody fragment
EVQLVESGGGLVQPGGSLRLSCAASGFTFDDYDIGWFRQTPGKEREGVSCISSSDGYKFYADSVKDRFTISSDNAKNTVYLQMNSLKPEDTAVYYCAAVKRAPKQYCSDYEAYDYWGQETQVTVSS

SEQ ID NO: 1479 - protein, 119 aa, Artificial
  Nanobody or Nanobody fragment
EVQLVESGGGLVQAGGSLRLSCAASGSISSLGLVQWHRQVSRKQRGLVAQLNSGGTTTYADSVKGRFTISRDNAKSTVYLQMHSLKPEDTAVYYCFLRVIVPGGFRDYWGQGTQVTVSS

SEQ ID NO: 1480 - protein, 118 aa, Artificial
  Nanobody or Nanobody fragment
EVQLVESGGGLVQAGGSLRLSCVASGBTICIRAMDWYRQAPGKERELVATITSDGSTYYADSVKGRFTISRDNAKNTLYLQMNSLKPEDTAAYYCKAPPYGSSCPLVWGQGTQVTVSS

SEQ ID NO: 1481 - protein, 118 aa, Artificial
  Nanobody or Nanobody fragment
EVQLVESGGGLVQAGGSLTLSCAASGNISSINIVNWYHQAPGKQRELVAFITNGEETNYAETVKGRFTVSRDNAKNTVSLQMNSLKPEDTGVYYCNLHIMWPTVRDYWGQGTQVTVSS

SEQ ID NO: 1482 - protein, 127 aa, Artificial
  Nanobody or Nanobody fragment
EVQLVESGGGLVQPGGSLRLSCAASGITLNYYAIGWFRQAPGKEREGVSCISSSAGSAYYADSVKGRFTISRDNAKNTLYLQMNSLKPEDTAVYYCAAQTAGTSIGCHISIGWYDYWGQGTQVTVSS

SEQ ID NO: 1483 - protein, 128 aa, Artificial
  Nanobody or Nanobody fragment
EVQLVESGGGLVQAGGSLRLSCAASGFTFDDYAIGWFRQAPGKEREGVSCISSSDGSIFYADSVKGRFTISSDNAKNTVYLQMNSLKPEDTAVYYCAAALRTVLAGTPTCDRYEYDYWGQGTQVTVSS

SEQ ID NO: 1484 - protein, 118 aa, Artificial; identical to SEQ ID NO: 1481
  Nanobody or Nanobody fragment

SEQ ID NO: 1485 - protein, 123 aa, Artificial
  Nanobody or Nanobody fragment
QVQLQDSGGGLVQAGGSLRLSCEASGRTFSSYAMGWFRQPPGKEREWVSTISRSGSAIYAYPVKGRFTMSRDNAKNTVYLEMNSLKPEDTAVFYCAAARSGVPSSRPTDYDYWGQGTQVTVSS

SEQ ID NO: 1486 - protein, 243 aa, Artificial
  Nanobody or Nanobody fragment
EVQLVESGGGLVQAGGSLRLSCAASGGTFRYQNMGWYRQAPGNEREWVASNWATGATAYADSVKGRFTISRDDAKNVVYLQMNNLKPEDTAVYYCNRLSRPWGWGQGTQVTVSSGGGGSGGGGSGGGGSEVQLVESGGGLVQAGGSLRLSCAASGGTFRYQNMGWYRQAPGNEREWVASNWATGATAYADSVKGRFTISRDDAKNVVYLQMNNLKPEDTAVYYCNRLSRPWSWGQGTQVTVSS

SEQ ID NO: 1487 - protein, 233 aa, Artificial
  Nanobody or Nanobody fragment
EVQLVESGGGLVQAGGSLRLSCAASGGTFRYQNMGWYRQAPGNEREWVASNWATGATAYADSVKGRFTISRDDAKNVVYLQMNNLKPEDTAVYYCNRLSRPWGWGQGTQVTVSSGGGGSEVQLVESGGGLVQAGGSLRLSCAASGGTFRYQNMGWYRQAPGNEREWVASNWATGATAYADSVKGRFTISRDDAKNVVYLQMNNLKPEDTAVYYCNRLSRPWSWGQGTQVTVSS

SEQ ID NO: 1488 - DNA, 371 bp, Artificial
  Nanobody sequence, fragment or construct thereof
caggtgcagctggcaggtactccgggggaggattggtgcaggctgggggctctctgagactctcctgtgaagcctctggacgcaccttcagtagctatgccatgggctggttccgccagcctccagggaaggagcgtgagtgggtgtcaactattagccggagtggtagtgcaatctatgcataccccgtgaagggccgattcaccatgtccagagacaacgccaagaacacggtgtatctggaaatgaacagcctgaaacctgaggacacggctgttttttactgtgcagccgctcgttcgggagtgcctagtagtcgtccaacggattatgactactggggacaggggacccaggtcaccgtctcctca

1. A single variable domain that specifically binds to at least one member of the integrins.

2. The single variable domain according to claim 1, wherein the member of the integrins is selected from the group consisting of the human members of the integrins.

3. The single variable domain according to claim 1, wherein the member of the integrins is selected from the group consisting of the alpha subunits and beta subunits.

4. The single variable domain according to claim 1, wherein the member of the integrins is selected from the group consisting of the human alpha subunits and human beta subunits.

5. The single variable domain according to claim 1, wherein the member of the integrins is selected from the group consisting of alpha1, alpha2, alpha2b, alpha3, alpha4, alpha5, alpha6, alpha7, alpha8, alpha9, alpha10, alpha11, alphaE, alphaL, alphaM, alphaX, alphaV, alphaD, beta1, beta2, beta3, beta4, beta5, beta6, beta7, and beta8.

6. The single variable domain according to claim 1, wherein the member of the Integrins is selected from the group consisting of the human variant of alpha1, alpha2, alpha2b, alpha3, alpha4, alpha5, alpha6, alpha7, alpha8, alpha9, alpha10, alpha11, alphaE, alphaL, alphaM, alphaX, alphaV, alphaD, beta1, beta2, beta3, beta4, beta5, beta6, beta7, and beta8.

7. The single variable domain according to claim 1, wherein the member of the Integrins is selected from the group consisting of the human variant of alpha3, alpha5, alphaL, alphaM, alphaV, beta1, beta2, beta6.

8. The single variable domain according to claim 1, wherein the single variable domain additionally blocks the interaction between at least one member of the integrins with at least one other member of the integrins-ligand family.

9. The single variable domain according to claim 1, wherein the single variable has one of the sequences selected from the group consisting of sequences with SEQ ID NO: 1316 to 1487.

10. The single variable domain according to claim 1, wherein the single variable domain is selected from the group consisting of a) single variable domains with sequences having SEQ ID NO: 1316 to 1487; and b) single variable domains with 80% sequence identity to at least one sequence selected from the group consisting of single variable domains with sequences having SEQ ID NO: 1316 to 1487.

11. The single variable domain according to claim 1, wherein the single variable domain is selected from the group consisting of a) single variable domains with sequences having SEQ ID NO: 1316 to 1487; and b) single variable domains with sequences having SEQ ID NO: 1316 to 1487, wherein up to 10 amino acid residues are replaced by naturally occurring amino acids and wherein said replaced amino acids are located within the framework regions.

12. The single variable domain according to claim 1, wherein the single variable domain is selected from the group consisting of a) single variable domains with sequences having SEQ ID NO: 1316 to 1487; and b) single variable domains with sequences having SEQ ID NO: 1316 to 1487, wherein up to 8 amino acid residues are replaced by naturally occurring amino acids and wherein said replaced amino acids are located within the framework regions.

13. The single variable domain according to claim 1, wherein the single variable domain is selected from the group consisting of a) single variable domains with sequences having SEQ ID NO: 1316 to 1487; and b) single variable domains with sequences having SEQ ID NO: 1316 to 1487, wherein up to 5 amino acid residues are replaced by naturally occurring amino acids and wherein said replaced amino acids are located within the framework regions.

14. The single variable domain according to claim 1, wherein the single variable domain is selected from the group consisting of a) single variable domains with sequences having SEQ ID NO: 1316 to 1487; and b) single variable domains with sequences having SEQ ID NO: 1316 to 1487, wherein up to 3 amino acid residues are replaced by naturally occurring amino acids and wherein said replaced amino acids are located within the framework regions.

15. The single variable domain according to claim 1, wherein the single variable domain is selected from the group consisting of a) single variable domains with sequences having SEQ ID NO: 1316 to 1487; and b) single variable domains with 80% sequence identity to at least one sequences selected from the group consisting of sequences having SEQ ID NO: 1316 to 1487; and wherein said selected single variable domain from group a) and b) binds to at least one member of the Integrins with a dissociation constant (K_{D}) of 10⁻⁷ to 10⁻¹² moles/liter or less.
